United States Patent Application Publication US 2007/0054278 A1 - sequence listing, part 71

SEQ ID NO: 95873 - DNA, 261538 bp, Homo sapiens
  misc_feature (1)...(261538): n = A,T,C or G
aatcaaaacagcatggtactggtacaaaacagacacatagaccaatgaaacagaatagagagtccagaaataatgcctcacacctgcaactatctgaacttcaacaaagctgtcaaaaacaagcaatgaagaaatgactcactattcaataaatggtgctgggataactgtttagccatatgcagaagattgaaactggaccccttcattttaccatatacaaaaatcaactcaagatggattaaagacttaaatgtaaaacccaaaattataaaaaccctagagaaaaacctagaaaatatgattttggacataggctttggcaaagattttatgatgaagacttcaaaagcaattgcaacgaaaacaaaaatagacaagtgggacctaattaagctaaagagcctctgcacagcaaaataaactatcaacagagtaaactgacaacctacagaatgggagaaaatatttgcaaactatgcatctgacgtaggtctaatccagaatctgtaaggaaattaaacaaattaacaagccaaaacaaaaaaattccattaaaaactgggtaaaggacatgagcaaacacttctcaaaagaagacaaatgtatccaacaagcttatgaaaaaatgctcaacatcattaatcattagaggaatgcaaatcaaaaccgcaatgagacatcacgtcataccagtcagaatggctattactaaaaagtcaaaagacaatcgatgctgacgaggttgtggggaaaagggaatgcctataccctgctggtgggaatgtaaattagttcagccactgtggaaggcagtctggagatttctcaaagaacttaaaacagaaataccatttaacccagcaatcccattactggtatatgcctaaaggaatataaattgttctaccataaagacacacatgcatatgttcattgcagcactattcacaatggcaaagacatgcagtcaacctagatgcccatcaacgatggactggataaagaaaatgtggtactgatacactatggaatactaagcagccataaaagagaatgagatcatgtcctttacagcaacatggatgaagctggaggccattatcctaagcaaactaacgcaggaggagaaaaccaaatatcacattttgtcatttgtaagtgggagctaatcactgagtacacatggacacaatgcagggaacaatagacacccggacctacttgaaggtacatagtgggaggagggtgaggatcaaaaaactacctatcaggtactatgcttattacctgggtgacaaaataatctgtacaccaaactcctgcagcacacaatttacccatgtaacaaacctgtacatgtacctctgaacctaaaagttggaaagaaaacacaatgtaatggataaattatctcagtgaaataccacatggcaaggagaataaacatccaacgtggactaatctcaacgtgtgacattaatacacataaaagagttttcatactgtaaaattccattcatataatgtttaaatatagagaaaatggatgtgtgatgttagatgtcaggattaccctggggcgaggtcatgatttttttcacttgatctgaggaatggttacacactgtgtttactatatgaagaatcatcaagctgtacttttctgtatttatgtttaacatcaataaaatgtttttttttctttttaaatctctgttctagctgggtgcagttgctcacatctgtagtcccagctacttgggagacttaggcaggaggatggcttgatcccaggagtttgaggctgcagtgagccatggtagcatcgctacactccagcctgggtgctacaacaagacactgtctcaaaaaaataaaaaataaaaaataaataaagatagccccatctttatggaactgactttacaggagagatgattaataaactaaaagaatggggaaaattgtagaggattagttggggtgtgtgctactgatagagataaaacaggaaggagaacaggcagggtagtgtgattgcaatttaaaataaggtggttaggaaaaagtgattgagaagctgacactggttctggttcagcaaattgtatttcatgtttataacaagcttatgagaatggggggacactctttacatgttacaataaaaaagctaagagattgcagagaaaggtgttaaatcacaaactggtcagacagtttgttgtgcaggaagaatatttatattgccctatgaatgggggatgacaacatagctggccagataattgacagacaacaaggatgaaaccagagatggcaggtgggccacctttcatcttaccagtcttcgtcagggctccgaagacaatgtgttgtcatcagggcttgacatgggagtcaagtaatctctggattatttgtcttgctcaaaattttatatattaaagaagataaaaggaatttgttggaaggatagggagtacctaagataattgaaagaaaaactaaggaagcaggttttggaaaaatacaagctctggagcagtaacagggaactctgtaaccttggttgaataaacaactgcttttactctttgcattattgctgtcaattttcaaattccaggcaagaagcagctttagcttagcatgggtcagttgatcatcccacggagcatcctgatggacagtcccacttacgctgggtgcaagtggtgaagggcagtccctggaagtgaagtggggtgctgttaggagaaataagaaggaattcatgctgggcaggcgaaacaactgttgtctaccataggactgcttgaagggttgtcgcagtccatctataattgaaactttcttttttccacgtggtaggcaaaattctaagatgacctgcaagatttctacccctggtgcacagaccctgtatgatcctctcccctggagtgtggatggaagctgagaatatgatggccatccctcctgaaacttgacgacgaatcattgactctgtgttcatcaaaggagagattatcctgggggacctgacctaatcagttgagtcctttcaaggtggaaaagtcagagaggactgctcctcctgaccttgaagaagacaaaagtggccagctctacagctgcaaggatttgaattctgccaatcacctgaatgagcttggagaatcgctctgggcatccgatgagatggcagctctgactgacaccttgatttcagccttctgagatctgagcagagacctggacacctgatccacagaaacggaaatattacatttgtgttgtcttaagcaggtgaattggtgttaacttgcggcacaacaattgaaaactatcactattgttctgctacatttctgacacatgtgttaaagcaatagttttccaggaatacaaaacaaagggagacccccagggaaccaggacagagggggcttacttagagtacaaagatcaagatgcagcagacatgattatttgagataaaggaagtaattcctcagcttgctgcttttccgggtttgggagaggtgggaacaggaagagggaggcaaccagattttttctgaaggagatttactagtatagactttcctttcaaatttaacatgttgagttaatcaaatagatattacaactgttcgttattaatatttcaaaggatctcattgttactgtacccaatgcaggttaaaaatgttaaaacttgggtctgggctgggcatggtggttcatgcctgtaatcccagcactttgggaggccgagatgggtggatcacctaaggtcaggagctcgagaccagcctggccagcatgacaaaaccccatctttactaaaaagacaaaaattagccgggcgtggtcacgggcacctgtaatcccagccactggggaggctgaggcaggagaatcacttgaaccggggaggcagaggttgcagtgagctgagatcgcaccactgcattctagcctgggcaacagagtgagactctgcctcaataataataataaaaaaaagggtccgaagaattttgttacttttacttgagcagtattcacctaccagaggatggcctgtgtggcatctgggtgtgatacccaagacaaaagtatacagagcagcactgggagatgattattacaatgtagttaaattccaggaagaatgttgcctaagaaatggaagggagcatgtctatgtctttttaaaactttaacatctttcttttattcctgctggttccagttaatattgctgtgtaaaaatccactttaaaggtgcaaaagaacaactattttattatgctgatggattctgcgggtgaggaattcagaaaggtcacaatggggatggtttatgtctgcttcctaatgcctgggccaaactttctggcactatataacaagggccccattttctccagcttccaataacatcttccttagctccctttaagccctcattggcagcttcctcaagtccttttagactcttgttaatactttggatcccttcctgctcttgctgcttcacctagttccaaagccagtgccacacgttttacttttatgatgttattatgttatgttttgttataatatccatcctacttctaggtaacaaaatcggtttcagttactattgctatgtaataaactgttattcttactatgtaataaacttcttccccttgcccctccctaagaagtcagtggtagaagagaaagaaaaaaagccccaagttacataataaaaccacataggttatatttataataatggtatcagtggttctcgaactttttggtttcagcatacctttatactccccaaaatagtagagaacactccaaagcttttgtttctgtgggttacatctattaatatttactatattaaaaattgaatacaaagctgaaatgtggctgggtgcggtggctcacgccagtaatcccagaactttgggaggccaaggcagtaggatcacctgaggtcaggagttcgagaccagcatggcaaacatggtgaaaacccgtctctactaaaaatacaaaaaattagtcgggtgtgtatcgagcgcctgtaatcccagctactcaggagtctgaggcaggagaatcgcttgagcccgggaggcagaggttgcagtgagccgagatcgtgccattgcactccagcctggttgacagagtgaaactccatctccaaaaaaaaaagaaaaaaaccaacaaaaaactgaaatgttaaaaagttatttaaaataacaataataaaccattatgtgttaatataattaagacattttaatgaagaataaatattttccaaaaacaaaaaaatgtggtaagaaaagtgttatcttttgcattagtgtaaattcctctatagctggcttaaagaagccagttagattctcatttctgcctttacattcagttcgacgtgatgttttggtggaagtataaggaaaatccatcagtcatgggtcatcaaaacccatgactgggtttcggtcttacatcctagccgataaaagaccgcctacactccttccccctgggcaaggctcgtgccccaactcctacaagcaatgcaggctgaaccttagttttccctaccgtctaacagtgctctaaggattgaaagaaagtaactcttaagcgacacctagataaaatgatggtcagtttaatttcatttctcatcacagtattagtcaatcaaccactcagatataatcacatcctgcgggcttattcaggggcggggtgggtagagataagcaatagcgcatgcgcagctcagaacgaagccccaggtggagttagcgctgcacctctgaggccaggtgagccgctccgaagcggagggcggagtcagagccgcttgtgggaggctgcttccgaccacgtggtacsccgaatgaccaatggggagacttgatgtcagccccgcttcctcaccctggcaacgggcgggtgactacttccggtgcagtgaaggctcggggctgaagcgggtgagtgtccctctttcccacgctgtccgcgccgctgccgcctccgcgctgctgcctctgtgtgtgggccccgtacgctagctgggacgtcctctccgggtccgagagggggcggcgcgcaggacaccccttgccccgggcggggctagaggagggggccaggatgtccctagttccctagtcttggtcgctctaggcggccccgtcgtcccccttcccagcctcatctccggcttggcgtcctcgtggccaccggggaagtactgtctgtatgtggggagttctcgcagttcttcacccactttgcagtctcaggctggagatgtctcagagtccgaggttcgcagacagccgagaatgtgcgccttgtcctgggtggcgggttgggggtaaggcagccccttacttagtaatagaggcctgatgagagtcctgcgggtcgttagcacttactactcagggggaggaggaggaggaagaagaggaggaggaaaggaccgagaagatggagcagctggagaggagggggggaaagcaggagctagagatgtcctggaaatcgagggtatcgtgtttccggaaggagagagttcaactttcctggcttctgtaggggaggggaaggaaaggtgtgttaggggccattagattgctgaattattattattctttattagcgaaggaatttttacttatattcttaggagtttaataatttatcttttttgttgtaaataaaacttttccccaccacttacaaaaagcagtgcttactaaggaacatctggaaaatgcagaaatagttatgaagagatcacctatagttctgccaacccagcattttgatcttttttctaatattttattcatattaacctatttgtgatcataatgtatgcgtgtaaaatacggttataactaagaggcatagttacatacattgtgttcattgcacggatagattgtcttttttcctcttgagaaagtcttattaaggtattcatgcaccataaaatttattctttaaaattgtaaatttcagtgctttttctcatatcgcaaagttgtgcacccatcaccactatctactttcagaacattttcatcacccccaaaagaaatcctatactcatgacagtcactccccattagattctcygctttctctcccaggccttgtaaccactaatctactttctgtatctatggattttcctatactggcatttcatataaatggaatcatagaatatatggcctcacttgtctggtgtctttcagttagtatgttttcaaggttcatcaatgtctgtgtatcagtatttcattctgttttatggatgggtaatgttccattgtgtgaatatgccacattttgcttaaccatcatcggtcgatggacatttaggttgtttctactttttggctattttgaataattctgctataaacatctgtgtacaagtttttgtatggacatacgttttcagttctcttgagtatatacctagaagtggaattggtgggcatatggtaactctatgtttaactttttgagtgagtgccaaatgttttccaaactggttgcaccattttacattcccaccagcaggttataagggttctgattttttcatatccttgggagcacttatctttctttttggttatagcagtcttagtgcttataaagtggtagctcattgtagtgttgatttgcatttccctgatggctaataatgttgagcatcttttaatgtgcttattgaccctttgtatatctttggagaaatgtccatttaattcctttgcccatttttaaattgaattgtcttatattaaagttgtatgagttctttctatattctaaatgtaagtccctttccagatacatgatttgcaatattttcttgcgttttctcccattttatgggttgtccttttactttcttgaatggtgtcctttatctacttagaatttttttttcaaagacttgtcaagtgcaatagggaggatatttagagttaatttttctgtatgatgtgaggtaggagttcagtttcattctattgcatgtggctatccagttctagcatcatttgatgaaaggactgtcctttcctccattgaatggtagaaaccatttcaacactcttgttgaaaatcagttgatcataaaagtgtaggttattgttttcttaaccgtttttctgtattggacatttaggttgctcccagatttttgttattctaaattatcctgtgttaaacatggtataaaaggcataaaaccttttctctatttagttattttggtagaaagttttctcagaagtggaattactggttagaagatgaatttaagtatgtcctggagttcatttaatgaggcattaaaccttcaatatcacgatgttaaaagcaacaacacaaggctgggtgtggtggctcacgcctgtaatcccagcactttgggaggcccaggcaggyggatcatttgaggtcaggagttcaagaccagcctgaccaacatagtgaaaccccgtctctactaaaaatacaaaaaaaaaaaaaaaaaaattagcccggcatggtggcctgcgcctgtaattccagctactcaggaggctgagacacaagaatcgcttgaacctgggaggcagagattgcagtgagttcagatcatgccactgcactccagcctgggtgacagagtgagactctgtctcaaaaaaaaaaaaaaaaaaaaaaagcaacaacacaattatttattcatgagttgtaatagcttaagggctggatttctatcaaagccctttgctgtaagatggatgaattccatgacttacttcctttttcaactgcttcttaaagaataagcaaacctacggtgaaaaactttaacaccacagcaacaggacgtggtagttttcaaagtggtgtaagaaaaaaaaacagtgtcatcacatacagtaggaaaataaaaccatcttttagagagatgaggcaagatttagaccttaaattagtgccatgaaagtccctgcagagcgtgttttggttaggccaagagtgaggtggacctagattgagctatccataaaacttgtggctataggtaagacagaagataaagttaggaatcatctgatttgctgagaggatagttttgaaaggttggcagtagatgaagttgctgaaggttggccgggagtggtggcttacacctgtaatctcagcagtctgggaggctgaggtgggtggatcacctgaggtcaggagttcgagaccagcttggccaacatagtgaattcctgtctctactaaaaatacaaaaattagccaggcatgggggtgcgtgcctttagtcctggccactcaggaggctgaggcaggagaattgtttgaacccgggaggcagaggttgcagtgagttgaggttgcgccactgcactccagcctaggcaacagagcgagactgtgtctcaaaaaaaaaaaaaaaaaagaaattgctgaaggaaacatttgcagttggggtcagaggtgagttatgaagaactagggtagtagatttgtgtgttgccaaggaaagcaggtgatcaagagaatcaaaggttgtaagcagaagattaagaaaatgccattgggttaagtaacttgggaaagatacaatttatggggagcaagacttttttttcttttttttcgaacagcttaataagatcagtttacccatttaaaatgtacccagtgtatcaatttacccattcaaagtgtacaattcagtggtatttagtgtattcacagagttgtgcaaccattaccaaattcaattttagaacttttttttatttttatttttttgagatggagttttgctcttgttgcccaggctggagtgcgatggcgcggtctctgctcactgcaacctctgcttcctgggttcaagcgattctcctgcctcagccttccgagtagctgggattacaggcatgcgccaccacgcctagctatttttgtatttttagtagagacggggtttctccttgttggtcaggctggtcttgaactcccgacctcaggtgattggcctgcctcggcctcccaaagtgctgggattacaggtgtgagccactgagcccaggcttttttttttttttttttggacggagtttccctcttttgcccaggctgaggtgcagtggcgcaatcttgactcactgcaacctttgcctccctggttcaagcgattctcctgtctcaacctcccgagtagctgggattacaggcgctcgccaccgcacccagctaatttttgtatttttagtagagaygggatttygccatgttggccaggcttgtctcaaacttctgacctcaggtgatccacccgccttgacctcccaaagtgctaggattacaagcgtgacccaccacacctggtcctagaacatttttatcagcacaaaaagaaagtgctcccagtagcagtccctctccatcaccctaccttccatccctccagctctaagcaatcacagatctaccgtctgtctctttagatttgcttattctggacatttcatataaatggaatcatataatatgtggccatttgtgtctgtttttttcattgtttcaatattctttaatgacatagtatgtgtcagcactgcattcctttttatggttgaataatgttccattgtgtgactataccacattttgtttattcatcatcagttgatggacctttgggttgtttttggatgctgtgaataatattgctatgaatatccatgtataagtttttgtgtagcatatgtttttagttctcttgggtatatacctagaaatggaattcttgggtcatagcataactctgtttaactttttgagcaacagttgcagaggatagacaagttgccagtgttatttagaaataatcatgatgaattttaatatcattactaggaggaaattgcaaaatgtctgtgttcaaacatttttgtcagaaataaagccattattaaagtgattgatagaagttttttttttttttggtctaaacctgttacgtgcctatgtttctcctttcattggaaatcttttgtgttgagtgttacctcaaaggttagctgaagtattagacatttttcttgtggatctatgtattgacttaagtacacttagccagtttcacataatgatttgtaacaatgattacawatatgataaaaacatcacagatatttgatgataagctacattcatgatttatttttctccctcatcttaactgtaaagaccaaatactatgatttccttccccctcaatttggattccctgtagcttatgcatcccagaagttcaatactcagagaaacatgcttgccctattttggttctttggcttagctcattacctagtattcccgtaaatgaataaattaataaaaatttttttataaataattcattcagatggttcaaattcgaaagtttcaagggggtgaacagtgaaatttctatcccatcttttgttattagttatccaaatctcctttggtaatcagtattgtatgacttttttgtttatctgtccagatttatactttgcatatggtactgcaaatacttctgtaccataccttaaaaaattagttatttccattccttttttacttagcaaatatgtttgagactgttacatatatgtttatcaagttttctcattgtttccaatggctgcttttatttttaaccacttccatcaagacatttttcgggctatatcttaattttgattgattttgccaaattgctgttgttgagtcgtaccaatttatactgccgctagcaacttagctccggtttttctgtactctcaaaatatgttattttttgataattgtcaatctaagttaaaaaatggtatttaagtgtaattttattttgcatctttcgagtgagatttagaattttttgtctggttaagctattatgtaatttttctgcaaactgagatttgtctatttgccctttttttgtttttgtcttttgttggcactctttatttattagatgtcagacctttaatgagttctgagttaaacaaaaactgatgttggagtagaagttgcttcatttctaactgaataaaaaatatttcagtaaccattgggagttggaggatagagtcatgtattgatagttaatttagttgagttcctttcccagtccagtggaactttagggccaggatttttggaggggtttgttgagattatatggtttgctaaataaatatatttcagatagtctctgagggagagtagattgctcaagaaatggaatattaatcaccttccacatttctttttagacaacgttgagaagcaatgctttaaaatctctcatatatattaagatgcctgttacatcaaaccatataaaatgttgatgttataattatgtttgtattttcttttcttttctttttttcttttttctttttttttttttttgagatggagtcttgctctgtagcccaggccggagtgcagtggcgtgatctctgctcactgcaacctcgcctcccgggtcccagttcaagcaattctcctgcctcagcctctcgactagctgggattacaggaacgcgccaccatgcccagctttttgtatttttagtggagacggggttttaccatgttggccaggctggtsttgaactcctgaccttgtgatctgcctgcctcggcctcccaaagtgctgggattacaggcgtgagtcactgtgcccggccaaaaaataaggaaatctgtacttttttttttgagacgaagtcttgctccgtcgcccaggctggagtgcagtggcgcgatcgcagctcaaggcaacctccacctcctgggttcaaggaattctctgcctcagcctcccaagtagctgggattacaggcacccaccaccatgcctggctaattaatagagacagggtttcaccatgttggccaggctggtcttgaactcctgaccttgtgatccacccgccttggcctcccgaagtgctagattacaggcgtgagccaccgcgcctggccagtattttcttacaaaatataaatattataatttcttatttatgaaaaaatatctcagatgacagtgattcaaagttgcttgaggtttcatagtccatactgcttagatgtgttttcgttttagctgaagctcgtaattttccaaagcctgagttttcaatctatgtttatgcttctagactaatggtcccaagctcatttcatggctgggccaaatatcatggcatgatacagacatgatggcattataggctgacagatgaaccactaaatccactttgtcaagtcatacatggctaaatgatagcctatttcagagaaatattgtgagaaataaccaaaagaaaataaaggtaattgaggcagattcttgtgaaatctttggaagaaaaacatggttaggaagacaaaacacaccaccacaaaacaaaaacaaaaccaggcatttaaatttactgttactcaattaaaaatcagcacttttgtagtaaaaattttttcctgcatttgtgaatctgtataaatatttgaatgcaacgatgtgtatatataattgattttaaatgatttgtcttataaataaaatgttatataataaaaattaaatagactcttaaaccaagaattaagggaatttaaaaatgccagataacagtgcttgtcagactatctctgttataaaagaccagctttcaaaaattttcaatccattgtgggtcaatacttatgtaaaatacaaataaaaaactccccaaataccacccaaaaccaaacattcaaacaaatttgaaacttaaaaataaaagctcaaatttttgcttgatttagcagataaaattgttttaaaaaataacatgaggaactagaaaagaattgtgaaaactacacatattgattattgaaaatgtgcttataaagcaactaacatgaataaaataatactctcttgtgggctggtaataaacactgggatgtagagtgtgttctgagtaacctgcttttttttattttggaataggcagctaagtaacttctttatgtttcttttcttttcttttttctttttgagactccttttttttttttttttttttttgagacagagcttactttgtcgcccaggctggagtgtagtggtgcgatctcggctcactgcaacttctgcctcctgagttcagtgattcttctgcctcagcctcctgcgtagctgggattacaggtgtgtgccaccacaccagctaaattttttgtatttttagtagagatgaggtttcaccatgttggtcaggctggtctcgaactcctgacctcaggtgatccacccgcctcagcctcccaaagtgctgggattacaggtgtaagccactgcgctcgcccctaagcaggtactatcagtggacagagagatttaaattctaacctttttatattacccaattaaataattttatcygacttcaatgggaataagaaaaaataattttaataaatagctttgataccttttttrtattgctcaattaaataacttaaaaataggatttttgaacattatctttgcatgaatttgtgtaagtaacttatgtgttggtggaaagaaatgtataccatctttgcctgttttcctttagggtaattcctctcctgcaattacttttggatggaagtatgcccctttctcagtagaagatggtaatcttggagaatgaccatggagaaggggatgagttctggagaagggctgccttccagatcatctcaggtttcggctggtaaaataacagccaaagagttggaaacaaagcagtcctataaagagaaacgaggaggctttgtgttggtgcatgcaggtaagctttgtggatggcttggaagatgccaataatgttgatttttctttttctgccttgaagtacactgagaatcacatttcacacttggaggaggcaaaactgccagagaggaaytggaagcaaagcgattgtttgacttggatatagtgaggacctccctctttactccccagttagaagatcttagaatggcagctcttcctaggttttcacttccctaacctattatttactttaactctatgtaatagatgtatttaggttaggtagtattaaaaccagacaaagtaatttttgaactctggtttatgttttttaaaaataatgttgctgtgggaggctgaggcaggagaattgcttgaacccaggaggtggaggttgcagtgagccgacatcatgccactgcgctccagcctgggcaacaaaccgagacaccatctcaataaaataaaataaaatattgctgaaaaaattgtattgattcccatgtgagactgtgggtatcttagggcataattattacacaatctttgagctggttcaccttcttttttttttttttttttgagatggagttttactcttgtcgcccaggttggaatgcaatggtgtgatcttggctcactgcagcctccacctcccaagttcaagcaattcacctgcctcagcctcttgagtagctgggattacagacgtccaccatcacgtctggctaatttttgtatttttagtagatggggtttcaccatattggccaggtgggtctcaaactcctgacctcgggtgatccacctgccttggcctcccaaagtgctgggattacaggcgtaagccaccacacccggcccaccctcttaatattttaagtgaggaaccttaagaccagagagattaagtgacttaagagacttcagacactggtggttggtgctagagccagtgtaagaaacacctaagtaggcccttatgtctcagtctagtgcttttgatgctgtgtcagcctgtgatctttctacttcagaggaccatgaggacagacacagtggagttcatcccctgggcctcccatctttaaaaggtcttgggttgcagaacagtgctgctctgcccaggtttcctcagcaggctctttttcctttggccatttttattttcttgtattcagagtctactttccatgacctccatgaagagagaaagaatgtctgggtttccttttaactttccctgggtagtcaagcaagatgacagcaggattaactttgatatggaatgaggagtagaaatgtttcttcttgtgagactggtgtcctgcctggccattaacgtttggccatatctagactggacaacccgagaagccttatgtgaatctaatccagagtatctaaacaaatccaaaaaaccagaaaccaggtttaatcccattttctcacaggtgcttttacaaggaggtgaggtaaatttacagaaataatccagttaaaagtagacctgggactagagcttctgccttcagactcctagtctgtgttctttccactacactatgttgatggtacatcttccattatcttccatgataccagtgagttaccgtattcagagtgagtgtttggaaagtgtaaaagaaaggtctgaaagttgtaacaagcaataacataaagcttcaattagttggaaagccttactttctataactattatgaccctgtccctcctstcttagacacagactagatgataatggctctgccaaccttaaataatggaattcagaagctatgattaaaggtagagcttattcatgcacaaagcttgaggatgtccacctgggaaacactgactccaaacaaatggggtctgtgttccaaagtggagaagttaagttttcatttatgtaggtagagatagaaaaattttagcaggatggtaacattttccgtaggagaccagtgcataagttacagcaatttgattggttatagattgctacatcctaaggaagattactttttactttgtgagaaggggcagtgatctgagagggtcttatctctggtgttgtttggtcttcctaattatttacaggaaaaaggcaaaagttgcagctgcatgttgtgtgactcagggtgcatagccacattcctttcaaggctcagaatgatttaatggctcaactttttttttttttttaagactaagtttcgctcttgttgcccaggctgcagtggtgtgatcttggctcactctgcaagcttcacaattctcctgcctcagcctcctgagtaactgggattacaggcacgtgccaccatgcccggctaatttttgtatgtttagtagaaatggggtttcaccatgttggccaggctgctctcaaactcctgactcaggtgatccacccgcctcggcctcccaaagtgttgggattacaggcatgagccaccgtgcccagctggttcaacagttttaactttgaattatttaatttcatactctcaggtaaaggttggtgctgggggtcagcaagaagagtaggaactctgagttatgataggatattgtgtgaattaagggtgaccctcacttctaaattattagaaagagtgattgattatgcaaaagcgtgtatcttgcacatttaagggtcaaaaattcatatccttgtccagtgtagagcagtttttttagcactagagtagacttgcccaaacttttgtgattcatgtagtagattcttgatttttcccactgcctatactgttttatctaatattcaaacaactaaacgctttttaatcttaacatttgaaaaatgaagtttatggttacttaaatgaaatagcagtatcacttgccataaagagaaaataactttaaacacagtgcaaacaaaacactgtaattgaagtttaactagatcctatttgtcagtggcttggatcctgagcctgcctttccattgttaaacagggaaattagcaagtgttaaccaggaattaaagatgtacggggtggkgggkgggctctgctgagacttttattatttcaaaaggatttacatgttaaggctattaaatgcccttgtcccttacactgaagtcatctttttggaatagtatcccatgctttaggaaatgctgctgaaagattgtggcctctgagatctaagacagccaacttgagatcacctrttcttagagaaccatgaagagaggcctattaaatattggcacaggctctgtgaatgttcagagttctcttgagaaacaggtttaggatttgggtgtattgtggattctggtggcttgggcatctctgctttcctggctccttgtacgacagtttcgtgggtgagtgctttctctaccttgaggaaaggtaggttaggtttgtgtcagagtctgcagacctgtaggaatcctaaggcctagagatgtagcttttctgtttttgtcttttttaaaatggaaaacatgtgtttgtttgtttgttttttggagtcaaagtctcactctgttgcgtaggctggagtgcagtggcatgatcttggttcactgcaacctctgcctcccaggttcaagctattcccgtgccccagccccctgagtagctgggattacaggcatgtgccaccatgcttggctactttttttgtatttttaggagagatggggtttctccatgttggccaggctggtctcaaacacctggcctcaagtgatcctcccgcctcagcctcccaaagtgctgggattgcaggcatgagccactgtgtttggcctagaggtgtatttcttaaccttccatacattggacccctatggggctttaggggtgggtagggataggtggttcagtgctccattaatgaactttgattagagagaggcctaattaagagagtttaagggctcttgtctttgtttccttcttgtttagattattcttaagtccctaactaagcaagttatgtatccttgtagggaaaccattttattcagagccattctcttgagacagttcttgggtatttgattaaaagacagagaccaccaggaattctcatagagagtcatgaatgtgctgtcacttagctttcagagacaccctgagctacattctagtgggtgagaggatgtgaagtgtttgtttaggaatggtgcaattggtggtggttgtggacatgcgagatgtaagacacctcaacttcaaatgttattcagaagcgattcagctttctgaattactcttatgaattctggatttgaaacagtaacttcccaaatggcaggggctttctgacagtcagcagagaggaacccggagggaccctgtccccgacaccttctgggttattagctgcagatcaaaagaactcctgattttggaaagaggttcttgaaaagaagaggggaggggaccttggtgaagcctctttggggacatgagctatttttagggcttttggcaggaaaagagcttttgaaaacggagataaggcatggtattaaaaaggcttacaytggagtaagaagtcataaaacgccatacagttagggcaatagttttgttttttactaggacagcatcagtttatatggagtatttatataacataagcaaggtctcttgatattttaataattaactggattttattttctactwtaggtgcaggttatcattctgaatccaaagccaaggagtataaacatgtatgcaaacgagcttgtcagaaggtatgaacacaatgtgtatgatctgtgcattgcagttttgaacagaaagcagttttaccttgaaattcaacatttaaaagtttcatttctaggacagtcttccagtttggactacaaaattattttgcttgtttttgtaggggatcgttttgtgttgttttgtgtttttctccacatgttgcttagctctttccccactttcccagattaaagtctgtatttttgtaattgtgggcacacaatcatatctcttttaatctttgcaacgatgttgaacttctgtagacagaaggatagagaaaacagcttaaaggcagtcaatgtgtttttccatgaagggaaaaaaataaataaaaaaattaaaatgggtactttcctatactttttcattctgtttttcatcatgtagtttgtatcatagcaagttcattgtcattccagagttcagttttgcccttgtactcagttgtgcttttttcccattggtttttgaggttttgctaaattgttgaatatttaatgtggggacaggaatggactcagaagaaatgtttgtttttattttgattcttactagtcttgtaggcaaaccttccattactttttatgcaaatagaatctagttgaatattatatatcaagtaaatatgcgtctctctctctctgctcttttcattgatatttacgtaacattaaaaagaagattatactttatcagagattcaagctttttcttatgaatgaagtcctataaataagaatattttgttacagggattttgttcttttgaaatttgtaataataaagctaaaagttctcgaagctattttatattttttcttatttttcaaagtgtgaaatttttctgtcatctgaaaataaattttatataactatagtcctagaaatctaatacatttgaatcgtatacttagcctctttaatatttacaatgaataaacttcttaaaagtttaattaggaatacagttcttagtttttgagttttctctttgttgactaaattggaatgttaataattcatttataaatgacttttccttctctctcttttcctctcctaatttatgctcaaggccaggtgattttatagacctttagtctgtgtagtttatattacaaaataatatgatacatcttgatttagaatttacattatagtatccaaaatgtttttgtcaaatgtatgcttttatcctcagattctggcatgcccctgtgactgagagtcacttctttttaagtatggagagtattaacagtgggaggagaaatgattagtttgagatttagtgttctgtataaaatatgaattgtcaggatatttgaaccaaactgggtcatacaatttctgtggctattttgaattgccttacaatgaatgaagcttactaaattccttgtacttttcatttaataactagattttattgttttaatttgaataatattaagtgagccatattaccaattaacctgaatataaacacttgcttgtttttaatctgagtagtttatgtcttaaagtatggaatggaactagtggtcaatttttattaatctaagtgtctcccatacttctttaagcttttggaaagtttgagaagttgtgattttgcaatgaataatctctccccttggtttcataggcaattgaaaagctgcaggccggtgctcttgcaactgacgcagtcactgcagcactggtggaacttgaggtatttcttttctctgttttatttaaaatatttgtgagtttatctttattgttcttaaatgacatgaaattgttgagttagtcaaccataaattatatgagcagtgtttcccaccaatattagcaaagttatgaagaagcctatgatattgttgttttcattggtgacttttctgagtaatataaaagytggttaaattcctttcttttcttttttttttgtgagattcatgaatacaaaagttaaggattggatacttaagtttcccattttcagtaggaaaatccttgaagttaacccccaaaaagtgatgtatattctgttgtttaaaaataaaagaaaaattccaactgtctagaagtgcctaaagtagaaggggaagattcttcacgaacctaacagttagatatataccctgaaattgtgtgctgtgaagtgtgccttgtcccagtgttayggttaggtttgtccccagtttactgtggacatcgaataattgagtggggaggctctcacgtttgccataattttttatactctagagtgaggttctctcagttctcttgatttggaaccttgatgaatttgtgcaggggatattgaggtcttcagaagatcgacttgctgctcaaacttggagaagatagatttgtgtcaatcagttgagaggattattgtgaaaaatatttttctggttgagaatactacttagggaatcaagtaagacatgatgacaaaaacaatgatgagtttgagggaggagatgataaagtcgacatttccaggttgactgggttgtggcccttgtatttaggctctcataccaaggcacttaccctttcatgcctttccttgtgaaaattgcccaggtgtttaccattagtcctagccgtgttttctgtatattctcatgcttaattgtggacctgagctttctgtatattctcttgcttaattgtggacctgagcttttgatcatgctttgtagattttaatttctcagattggtcctaatgtagtcaaggaaggtgaaagtatatggtgggcacctagttctattgaatctgacatggggatgtgtgatgccctcctgatatgactgatacatttcataccagctctaccagtcattagccatgtgtccgtgggtgtggcacagtctgtccttgactcagtttccctatttatgaggatagtaattcccacttcatggagttgtgaagataaactgagttagtatatgcctaatacatgacagtctcttagaacagtgtgtggtacgtagtaagcaccccataactgttagcaattattacagttatgaggtgctttggaaatggtatgtatgagatgaatatttatggcaactattaatgacaagttttacagcatcaaagaaaggttaattatatgttgaggataagaggagaaaaatgacataagaaagaagatagatgtatttaccaccaaatgttacctttactcaaaacagacacacaaagagggcttcatctaacttaactagttcaattgttagttgaaaattactttcatggagtcactgtaggtctgggaaagaaggttaatgagtatctggagaatatactagaatggcaactatgaatgcaaaactgaataaaattaagtttctcttttyatcttagaataactttaattttcctaagtcatacttatatatcatgtttamtatttcattctattttcccctagtgttgaatcctacttttaaggggtttacttatttatacttaaaaatgataaaaatacattttgaaataatgagtttctcctgagtaggtggacttacagtttcggataacttgtgtttttttaagaatgtggatatgaatttaaaggaaaaaaatttcttgttctattatttttgmttggaataagtcataaggataatggtagcatagaattcttccccaagtgactttagtacatcccacacctcaacttttagttattttattttttatatatatatttttgagatggattctcactctgtagcccaagctggagtgcagtggtgygatcttggctcactgcaacctctgcctcccaggctcaagtgattcttgtgcctcagcctcccgtgtagctgggactacaggcatgcaccaccacacccggctaatttttgtatttttttttttaagtagagacagggtttcaccatgttgaccagggtggtcttgaactcttgagctcaggtgatccacccacctcggcctcccaaagtgctgcgattacaggcatgagccaccgtgcctggcctcaacttgtaattattaaatttgtggaagaatttcaattaattatctaacaattaacttttctatggactctttgaatgaaatayatgttaatagtttaaggttaagcttacactaactggaagaattttcctaaatcttaagaagtatgttgsaaatcatgcttatacttccccctgcagtttctctcaccttgaataattgtgattcattaccttaaaacaggataggttttcagatggagttcagttggggtagtattgtaayagcttgggtcaatggaaagaygtaagaagattggattctagtatttgctgtacttagaraaatataagtagcagtattgagtcctttcagaatactgaaaagtgctgagaaaaattctggagagctgtattaacaatgtgttatatttaatttgagaataaacacttatctttagttttggtcagtctattcagttaagtcatgtctggattattgaacagatgcaaacagtcattgttctyttctctttagactttgggatatactttttgatttaaaaaatgatgttcttgccactgagcttaaggaaacaatacataaacatattttaaaaacttgcccgttatattattacttaggcagatattraaattgatgtgaattccttaaatastaattgtggattgaaatgactgaaatgttctaatggtctttattgcctagaaagtgtatctggcygtatatttaaaaaatgtgataatttgtattttcccaaatagtgaaaagtacaccgttcttaactccatgcatggggaagaggaagagacaaggcaaaagaaatatgtgtatatgtatgtgtgtgtgtgtgtgtgtgtgtgtgtgtgtgtgtaaataccacagagacacacacacacacagagtaaagggaattatgcagacatatcattttttagcttttcttagagactgataattttgtgtggttttatttttctttaccaccactgcagacaaatgatgtcatcttaagactgtcacttctggacaccagaatgaggtgttttcttcatttaagtaaaggaggggcgggtgcaaaagttcctatctattaaattgaccaccttcttcctttagarttttgggagggaaggtggctgcttctgtatgagaggttttctgcagtgtggaaatgcaaatgatattactccaaaatatattttgtttatcttcaaaatgcagggaagaaaatggaaaggtcagtttatagatcatattttaatgatttattggtaaatcgattcattcctgttgtttcatatagcttttttgagattatcttaataactgatgagaaagtgaattctgttcactggatggtacaactctggtttcactcacagcagagaagattaatattgtgaaagaatttggtcttcatatttgggactatacatttgratgacagttgcttttttggctgcctttgaaatagttttggatcaagtagtgacgtggatttaagattctggaccataattttgcatatttcacatggtgtaacttgtgatgtgaatttcttttttgagaaaattggatatagaactgggtgagtcatgatgctaccattttcttaggattgtttctaaagtagaaagtgtttcatggattctgatagaaaatgaactatttataaaatactgcctgaagctcattttgcacattggtgtttttcttataaagtatgaagacctggtttaaaaaagtctaatgagtaataataggtgaaatatgaacgacagacttttggaaggtaatttataatcttttgtgagaaaactgatgaatttggcagaggttttgaagatcttgttgtaacctttgagaaagtttggttaattcattctgaaaactgattattttggtaggtagaatactgtgtattaagaatagtgataggggccgggcacggtggctcatgcctgtaatcccagcactttgggaggccgaagcggacggatctttgggaggccgaagcggatggatcatgaggtcaggagttcaagaccagcctggccaatatggtgaaaccccgtctctaataaaaatacaaaatttagctgggcattgtggcgcgttcctgtaatcccagctagttgggaggctgaggcaggagaattacttgaaccaggacccaggaggcagaggttggcagtgagccgagactgtgccactgcactccagcctgggctacggagtgagactctgtctaaaaaaaaaaaaagaatagtgataggaatagcttttacattttatatagtaaaaggcaaattatacaggttcctttgttaaaaatcttttgttgaacttctgttattaaaaatggactgtgaagttttttattcacttgattcatgctttaaagctccctatggtcaggggagatgctaattcatggttaaaactcgtttcttgtccaaatgctttagtgtttataggggagattatattgggccaagtttttagtcattctgttaaaaacagttcattgtcttggatctctgtgtaatacaaatattgcttgcttgtaaactctagggaagtcctttaagaataacttattcaggtgactgatattttggtatgtaagagaaagaaagtaggtattttcattatatatttatattattatgtataatactgttatacatttgtctgtatctctacattttttttgctgttgttcagacagattcttgctctgtcgcctaggctggagtgcagtggtatgatcttggctcactgcaatctccacctcccgggttcaaatgattctcatgcctcagcctcctgagtagttgggactacaggcgtgcgccaccacacctggctaattttttttgtgtttttagtagagatggggttttgccatgtttcccaggctggtctcgaactcctggcctcaagtgatccacccgcctcggcctcccaaagtgctgggatgacaggtgtgagccaccgtgcccagctagctcttcatttctttaaggcaggcagggatctccagaatgggaatgttggtcacacttgagtagttcattgtgagcggaccccagcccaggcctcttgtgcagctgcaggaataggccatattctctyccctgggctctatacttctggctggaattgtctgtgtgcctcagggggatagaakaaacttctamggcctgccagtccttgaaatgcctagtggtcatggagatggtgtggcttcctgatggcatatgggcatacctaggatggaaggggacattgggaagggccgataatttcccttttcacctcaccaaacttataacaagttttcttgtgagcagatgcttaaccacaccctgctccctaccctacttcagtcagttggtttttattgcagaaaaggaggggcatctgctttaaggtcatttttgttatttgggaagtttaaaattatttaaataaacgagcatctccagtttcctgtacatttttattttttgtagaaattatattttcataagcagagtggtcccttgctctttccccagcgccccctgccccccagtagagctgaccacactggaaagacagcttgatgcatttagctcacatttacgtaagtgctcattaactatgatgtggctggtgagtctaattttagacctaccacccttgaaaatctcatttttttcttccattgataatatcttttattctctgtaaggggagtgggatgtgtttctatgtatgtgaagtagaagatttaccttttttcttttgtagtacttacaatgttttcattgcatgaaatttgagttttgaccttaggtgctcttttttcctgttttttttctttacttggtattattgattatttcaaagaccctattttgcctgtctgtttagcagtattcccagtggtgcttcagtatttctgtgtattccagctgtttatggagtctttatgtttctctgcattttttgttttattttttgaggtgtacacacacagttacacttcatggagttgcatccagccaagtatccatgtycttcttgtgaagaggcagagaaaatcacctctcccaagaatttccaccttctgaacaagggaaatgtatcctkaagagctgtacgcagatgggaggcaacttgtttgcttgttctgctgctagagcattgatttaattagaagacaggctgtgggtggccatgtgcagacaaagaagcaccagacagagcccatttagcctgggacagtaaaagtaagttacactctttttaaaacacttttttgagtactgatgctgattcttgcctttagtactaaggggcaacttgtaacttactgtttgtgtttacacatagatacatccgttctttttctgagaccctrgaaatgacacatgctctctagcacaaagtacctgcttaatggaaaagcagtgatttcttccccaactgcccttttttttttttaaagaataaaaagaaaacggaatcaatgattacattctagattaattttacatggtagcaaacccggtgttagcttttgaccaagtcaaaacacttaagtatagagcttatcatgcttttactttgtagtaatgggaacatgaaaaatgattttaggcttttccggccatttcttgatgaggtatgtggatctcatcagatatattcatccwggctgaatctagtagaagagagggtccaagatcagacctagcagttcctgaggagcatggaactctctatgtatgcccttgtttttctctgggagttgttactctcaaaaatatacttcattttggaawtcagttttgagctacctaaagccatatatggtagcgtggtgtagttagtggaaatcctgtgtkttgactacgtggaaacaatttagacttttggatttttgagtgtaaaatgtcttctagtcctatattaataggaatattacacaaaagggatttaattagattcattggtcctaggatttatagtgttgtgatttttgaatgattgtgtgtgtgtgtgtgtatgtgtatttgtgtttgtttggatctgtgtcatttgcggcatcaggtttataccttaacatctactgtttttgtctgttttgctcttggtaatgaaggatgtaggctaataagatttttctatgtttggaaaatcacaggctggtatgatggtgtttaatttcaaagactaccttttgattttaagttttttttccatctctcaaacccgcccctttattcagaatctggaaaagaatgaggaagaaacttaagttacataatttttaagattctcggcctggcacagttgctcacacctgtaatcccagcactttgggaggccgagacgggcggatcacgaggtcaggagatcaagaccatcctggctaacacggtgaaaccccgtctctactaaaaatacaaaaaattagctgggtgtagtccgggtgcctgtagtcccagctactcgggaggctgaggcatgagaatggcatgaacccaggaggtggagcttgcagtgagctgagattgtgccactgcactccagcctgggtgacagagcaagactgtgtctcaaaaaaaaaaaaaaaaaaaaccagattctcatcaagattctaaatcttgctctcctctctctctttctttcatgtgttcattacctaagtgttagaataatgaaggattgtacctcactatagaaatcagcttaaagctgaatcttagacatttgacagaagttctttggccattcccattgccaggtagtttttacwggcagtcattctcactcagggtccagcctcctgcatggtgtacacatttcctgacagttcatgacacacatgtactgtaacacaggacatcaacactataacacattcagagtggggaatttatttatgtttmscttttctggagtatgtgcaaatgtaagcaaygttttctagtgggttggaagtctttttattaaaaaaagcttagtagaggacttaaaagttactagtatccctctttcctctccagttctgaccatgtcatttgataaaaggatggtttaaattattataattccatggtctgttaggttcttcttgagtgatgtttccatattattgtcaatatggttaaaaggtataattatttaggttgaagggaagtataagtggctgccaaatttggtagtactggagaaacagctacatttgtcttttctgttttagctcatgtggaaaggacaatttcaggtactgtgtgtgctaactaacctcttcctggacatcataaagaatccaactaaaacaaagtttaaaactatttcaaatgtgaaagtttattgaagccaatattctattttagagatttgtgttatgtttttgacaagtaactgtactgtaattatgtggctttcaattaaaaaatgtgaaaactrttgtgatgtcatttttctgcttaattatgttgtatgtgcccttgtaaattaggcagattagtaatagaaaggaggtgagtgcagatgtgcagtgcctttttgtgaaaatattttaaataataaaaatatcttgagctcayagtgggcagtgcaagaaaaagtaaagtttccatttttggacagaatattttatgtcagattaacaaatgctctaatgaacaaatattaacattggttcaattttttctgacatttccagaaaagcttgggcacttaaagaagatcataaaaagccttagtttctactacgtatgttgttgtgtgagggtttttttttttaaatgaagtatgttgtcttttgtaaattgaatagttaaaaaaatgaactgtcacagatactaaaacctggtattcaacatactatgtttgactcaagtgttcacagaatgtgatgcaaacaaatgttctctcaacttacatccaggatagctaaaatattactttaacacatgttgaaagtagagtgctctatttggctagatataattccaggctgtctaagttgagtaatttcctcagacattccaactttgatcaactgcagcaagaacttttagcatgtctgtaaagcagccagtgcatctgtaaatatgtcctgagatagggagaaaagagaatgccaaaaaagaaagaataccttgttgtttaggagcagtttacagaacaaaaatggaaagttttttgtttccttaggaacttttttttaagataattgaacctctgatttgcaagtatgccctgaggttctgtattaatgaatgaaagatacttcatttgggcctaataaaagtgttttgtggctaactctgctgaaacttattggttaaagttcattaattcttgaactttttactctttataaatgtaatattaattggctgtagccaattggctacagcctcaaacataataatatatagctcagtaatgcatgtcttaattgtttataattggccagtatttgggtgaaaatgttcatatgtgactaagaataagtctaagaacaggcagcatcactacagaaataatctcatgtgcctttttttcaatacatggatgaaaataggctttctggctttaattttcagtgacccgaaaatgaatttgcaaatatctgctaattttcctatacaagcattgacttaagagtgtttataatggcagatcaccctctgctatatgggaactgcatgttttctgtgttttcggcacaacacgttcatattcacatggatatataacttccctggaaatattttaagctgtagttagcaactacttgcaaactggatattaaattggatgataagtctagcttctttctgaccttgctttctgtagtcccatgataataaataatgtgacttccaattagctgcagttatgaaaattctgctttttagatcaatmctataccaaaacttagaaggaattattaatcctcttgtggcttctatgttgcagatctctattattgtccatattctgtaattattttgtcatggaaaacaaggttaacacagttaaatttattactaataaaaaaagttttgccatagttttaccttcttttcattgagcattttttccagaactgaacaaagtgcagtataattgatagatttacatccttcaaacccatcctctatatcctaaaataagtgcagagaaatggtgaatgggcgtgctgggagagaagatggaggggcaagtcctggatgtagtaattttaatttcttgggcagggtacttgaacagatatctgagttggttatcttgttactgtttctgtgtttaccagagaatttttcttccgtaaaccctgtccatctgaatgccaggatttcttcaaaatttaatacttattttatgtcatgtgcctactttcttgatcttgaagtcgttaatgttcatagtgggaatggaagagtcaacttttccctatgtgggggctggttatctgatttatagatagattctcattatcctataattattttacctgattatatctttgccatttttgcatgttacctgaacattatagccccacctcccatgcgcttctgtgtatggggaatgtgtgtgtgtgtgtgtgtgtgtgtgtgtgtgtgtgtttgctacaaattactagttctaaaaaggttatcatgttttgtcttgataggcagtttaccactgggtaaagttgtagatgaagttgtctatactaatgatatttgagaaaaataccatgatattttattagttttctggtatttgagaaaaataccatgacttcctgtggactctgagtagaaagctcatctgactcgttttggagaaggaaaaaggtattacaaattttatttgttataatcagaagatatgcagcatttctgaccactaatctggctctttttagtaaaggtgagttgacacttggtagactgcagtacaggttacttctgtattgtttctttaagtagcaagaggtaattcaatattttaaatatttaagcatgataataaaatttgttgttaggactgtcatttgtgtcaaagagctattttgcctgaaacctgtattgtatggaaaactgaagatttacgcaagcttagattttgcatctgaagaagcttgagaccttcttaatcttacaaagtgatgtaggccagagattgcaaaagagacatttcacagatgcgtgttgattggcccatagactagcttttaaaaactggaatttgttgtcaacatgtaaaaatgaggagactaatataagcatctggacttctaaattatcttggcaaaaatgagatctggccacatggagcatgcattctcccagggctacaatctcccagagctaagtgacagctggttcttttgagtgtaggagcttttgtagcactgtatatcattttaaggtatagctggaaataagtcttggacagagattattagcttttgtcttgttgcaagggccagggaaatgaatgtatggtttaatggtcattaatttaatggtctagaggctgcgaattgttgtaatagggatttctaccaaactaatagtaaagccggaatgagctttgatttaatttttcagaataggaattggacttaaatattaacttttattttgaaaatgagcttcaaatcaaactagacttttcaaaaaaattcctcattgaaacaatttgaactaataccaaagtatatcactctaaaatttttgacctgaagctaaagcagatcaaaaacctcggtgacccaaataaggttgaaccaaattgtttatttacttttagtcccaggagtgaaatattgtttttactgtttgtgatgaaggaacgtactgaaagtccaagcatactgcactgattttcacactttgtcctgataacttcctaaaggatatttagcttccaacatcatttatcttgattgcattacatcttaatggaaaacataagaaaaattgctgttttgtggataatatttatggctgtctttgtgatgattgcccagaaaggtttctatgtctatttaccattgactgtctcccattttattaacttttctccagtccatctaattttttttccagggttgaatcctagccccagagtggttagcttttgtagcctctcatggatcatttgtagcttttttaytcccaatatcctctgtgctgttgcaatagatgcctttacaagccccctccagatgtggttcatggagaatatgaagttaagcagctgacggagttcatttacactggagtttctcaaggtgagggctggattagaattgttggaggtagcttattttaaaaaatgatgattccctagctttcaactcatgacctggaccagaatctttggggatgagagtctggaattttaattctttgactctttaaaaaaaaaactttgtaagttaattgtggatacatgcaggcataagaaataatactgagagatcctttggaccctttaattcacaatggtaacagtttttaaaaaatttgcaatcttattttgaaaattttatagtttcaaagctttcttgtgtgtatagtatacatatggaaaactatacacatttattttaaggggacagcttcatgaatttttttcagagtgaacatggccggccttgtgtcactagcacccagatcagcaaacggaacatttctgccctccagaaggccccttgtgcccccttcagtcacctcagggtaacactggtcctgacctctattgccatatattagtcttgcctgttctagaacttcatgtaaatggaatcatatattatgtattcttttgtgtctgcctttttaaattgaagtgaaattcttagaatacaaaatgaagcattttaaaatgcataatcccatggcattaaaatgctcacagtgttgtgcaactaccactttcagttccaaacatttttatctccccaaaggaaacctcatactcatcaagcagttgctcttcattcttttatcctttcccccttgtggaccacccatctgctttctgtccatggatttacctmttctggatattttatattgatagaatcatgccatttatgtggcctttgctgtctggcttttttygcttagaataatgtttttaaagtttgttcacagtgtagcatgtatcagtacttcattttttggaggagcagtattcaacattattcatgtatctatcacagtttgtttcattccaaatccattcattcattgatggacatatgggttgtttctaccttttggctattgtgcatagtgttgctatgaatactcttgtataggtatttgagtaacttttttcagttcttttgggtatatacctagaagtgaaattgctgggtcatatggtaattaattctatgtttaacttttttttttttttttttttttgagacagagttttgcgcttgttgcccaggctggagcaatggcgccgtctcagctcactgcaacctccgcctcccaggttcaagctattctcctgcctcagcctccccagtagctgggattataggcgcccaccgccatgcccgactaatttttaaaaatatttttagtagagatggggtttcaccatgttggccaggctgattttgaactcctgacctcgagtgatctgccctccttggcctcccaaagtgctgggattacaggtgtgagccaccgcgcttggcctgtgtttaactttttgttgaacctttttccatggtaactgaatgaaccctttttgcatttccagcagcaatatgcaaggttataattttttctacatctttgttagcacttactattttctgtttttgtcgtcataactgtccttgtggatgtgaagtaaaatctttgtagttttggttttcatttcgctgatgatcatgatattggatatattaatgttcctgtagccatttgtgtatctttttggtagaaatgtttatttgagtctgttcaagttttttgcccattttcaaattgattttttgggttgttattgaaatttggagctctttatatagtctagatactagactatcgtacttttctataagtctgaaattatgtccaaaaaaatgataaataaattgtaactactgctatagttttctttttaataaaagccctctgaccatccccagtactcctattgcttacctgttttattttttcactctcgtgtttactgctatctgacatgttatctaatgtatttaatttcttattgtttgtctcccttagctagaattgaggctccatgtaggtaagaatgtttttctgtttcgttcactgctatatccccgtggtttagatcaaggattggccaactatggccagaaagccaaatctggccagatgcctggttttgaatggcctgcaaactaagaatgattttcacttttttaaatggttgaaacaaaatcaaaagaagaataatatttcatgacaccagagaagtatatgaaattcatatctcagtatccataaatgaagttttattggaacacagccatgcttattcatttgtgtattttctattgctgcttttgtgctacagtggcagagctcagtagttgtagcattgtctatgtggcccacgaggcctgaactagttaatatatcttgccctttacagaaaagatttgcctggtacaatggtgtccaataaatatttgttgaattaatgactcttaacctgtgctaccacagaggaatctaaattggaaatcttttaaccatccaattcttgaaaatttgagcttaattggcaactaaacaaaaaaaaattccccaaatgattttttcagtcagtaatacagtttcattggcttccattcatcctgtaaatgaaaactgatgttgggataccagaaaattagtaattcttagaatagtgctagctaagataggcatattgtacaagttttactagtgttagtttgaaaaagagtataatgacatggagtacatatcctgtttttgtaactcttttaaaaagatgcaagaaagttcatttcgaaagctttttccccacctttctcagctttagaaggttaaaggtatctgcttatcaatgaagttagtaattaaaatgatttttctttttttttgagacagagtcttgctctgtcgcccagctggagtacgcagtggtacagtcttggctcactaaagcctttgcctcccaggttcaaggttcaagtgattctcctgcttcagccttctgagtagctgagattacaggcaccygccatcacgcctggctaatttttgtatttttagtggaaatggcatttcatcatgttggccgggctggtcacaaactcaattaaaatgattttgataggacattcaattttcaacaagagttatatattctactttatttcatgtatctaatgatgtgtttgttgaatttgcacttgagcgacagagtgtgagtactaacatattagtaatttcctgttaatgtctgacttctcgttaaaggaagattggaaattggacaaacataaatcattttatataaaaatgattttataatgtgccastctagtttttgtacaatatttgaaaactaaattgtttgcatctgtaagagctgttaatagaggtctcataatagatcctcagagatgcagtataccctggagccttgcaaacagttcttatattattttatgccttcagcaaaggacattaaatgggtaatacaagttgtggtttatagtgaaagagtaatactttgcagatctttgccttggcttggggttccaaaatttcattaataggaaagggtttccatgtcgtggtgggagagtagctcctgacttgcctgttggcctttctgccctctctttgctgggttggttagtcaaagggcatctcacttcttaaagccatgtctccttgaaaagttatgaataagtttaaaatatattttggttttagaattccattttttagaaacagaaaatactgttgcctaagtttgtttaatttctcttgttttaatcttgaaaagattagattcttagcactccactacattttcctgacatttctctataggagcaacctgtaagaattaataagtatcagcttgcttaaggggttatagctcacaataattactctgtttatatctagttataattaactgctgttcattcattctgcaaatacttattgattacctacctgccatgtgccaggcattgccttacatattgggatatagcacctaaagagacaaattctttttttttttttttttttgagacggagtctcgctcagtcgccgaggctggagtgcagtggcgtgatctcggctcactgcaagctccgcctcctgggttcacgccattctactgccttagcctcccgagtagctgggactacaggcgcccactaccacgcccagctaattttttgtatttttagtagatacggggtttcaccgtgttagtcaggatggtctcgatctcctgacctcgtgatctgcccactttagcctcccaaagtgctgggattacaggtgtgagccaccgcgtccagcctaaaaagacaaattcttatatttaagggtcttacattctatttggaggggtagacaaacaaaaattatgtatactgtcaggtagcggaaagtgccataaagaaaaataaaatagagataagagaatgttgggaatggctggggaaatgctattctagatgagtcagtaaggggagcactctctgataaagctgacttttgaacagagacatgaatgaaatgggggagaaagccatgtgaagatgttggggaagggagttcttgttcagagagaaaagtacccactgtcccttcatattccacttcattcttctttataatactaatcactgtgggacctcaggtatttatacatacatgtaatgcatctacacacacacacacacacgcacgcacacacatgcagtctatatttatgggccctcttctttcactagaaatctctcaccaaactcagcatctcaaaggaatgaatgaataatagatgcaacagccctgaggtaggggctttcttgatgtgctcagaatcgcagtgtgggctggagtgtggtaagagagaagaatgcggagagtaagttggaagagggagggaagggtcagatcatgtagggccttgtaaatgttgaaaattaggactttggattttattctaagtgtgctaggaaaccattgtaggtttatgaacagaggagtgacagagtctgacagattttaaaaggagcactggctacttactggacatgattattaattacgcaaaatgagttacatcagaagatcagatgaccgcttaaaaagtttatgtatatkattttaaattatttaaatttattattatttttttttagagaaaggtctcactctgttgcccaggctggagcgcagtggtgcaatcatagcttactgcagcttagagctcctgagctcaagcagtctccctgatctccctcccgagcagctgggactacaggcatgcaccaccatgcccagctatttaaaaaaaaatttttggagagatggggtcctactgtggtgcccaggctggtctcaaaccgccgaccttgagtgatcctcctgtctcagcctccaaaagtgattttattatttataaggggcaagttagtatataggctgattagtttatgtcaagtaataggtatactacttttttgtcagctttattggagtataatttacatgcaacaaaattgatcaatgtaaagtgtacaatttgatgggtttcgacaaatatatacaattgtgtaaccaccagtacaatcatgatgtataacatttccattactctcaaatttccctcatacctatccacagtgaatcctctccctcagtggcccctggcaaccattatctgctttttgtcactatagttcagtcttttctagattttattctaaatagaattatagaacttgtgatcttttgtgactggcttctttaactcacgtaatgcttttgagattcacccatattgttgggtgtataagaaatacatatatatatatatatatatatatgtattatgtctttatgtagactttatgtgaatttatgtgaacatatgctttcatttctcacagataaaattcttaggaatagaattgctgagtctgtggtgagtgtatggttaactttaaagaaaactgctaaacaatttgccatttgtgttctcactagcaacatatataattcattcagatttccacagatctgcagttttgccaatacttagttttgtyaatcttttaaattttagtcattttagtggttatataatggtatctggtggttttaatttgcatttccctaatggctactgttaatgaaaaaattatttatgacccgtgtgaaaggtggtaaggcagactttattcaagggaggaactattgtgatagctgtaggaaccactgctgtattagttgctttcgcattgctataaaggaatacctgaggctggrtaatttataaagaaaagagrtttatttggctcttggctctgcaggctatacaagcatgacaccagcatcagctcagcttctggtgagacctcaggaagtttaaaataatggtaggagacaaaggaggagtcggtatatcacatggtgagagagggagcaagaaagagagggaagaggtggcaggctcttttaaacaaccagatctcacatggactcatacagtgaaaacttactaattactgtgagaacagcaccaagccattctatgaagtatccgcccccatgacccagatacctcctactaggcccacctccaacgttggaggtcacatttcagtacgagatttgaaggagacaaaacatccagaccatgtcaactgctatgggattttgcagtgagggagagagattgggttcaactctgaatacagcatggacaagtgacaatttatagctaaaaaactgggtaggagtcagtggatggaaaattactaacaggaaacatcacaggtaaggggagattctagctaaatcggcctaacagaattcttgctggagacagaccacagtgatcagatgtcacttgggggatggtggagaatgaggaatctgattaaatattgagggtgaccagatatcaagggtgggagtatcttgttagactgatttagcaagattcttattaaaattgaacagtacagagataaacatggaagtccaaaagtctagcccagttgaaaagtagttcagggaaatttgaatagagtttgatcaataagagacattttatggctaatgatgctaagcatgttttcatgtgttatttgcaatctatataaaactgtttgccccttaaaaactttggattgtcttactgcgttatgtatggatttttaaaaataaattctggatagaagtccgttaagagataatatgttttataaaatttctcccagactgtggtttgatttttctttaataaacttatttatttttatttttttgagacaggatcttgttgtgtttcccaagctggagagtggtggcatgatcatggctcactgcagcctccacctcctaggctcaatcgatcctcccacctcagcctccagggtagctgggactacatgcgtgtaccaccatgcttggcaaatttttgtattttttttttgtagagactgagtttcaccatttttctcaggctggtcttgaactgccggattcaagctgtctgcccaccttggcttcccagagtgttaggattacaggtgtgagtcaccctgcctggcccatttttcttttttctttttttcttgagatggagtcttaatttatctcccaggctagagtgcagtggtgtgatctcagctcactgcagcctccaccctccgggttcaagcgattctctagcctcagtctccagagtagctgagattacagatgcacgccaccatgcccagctgctttttgtatttttagtagagatggggttttaccatgttgaccaggctggtcttgaactcctgacytcaggtgatccacctgcctcggcctcccaaagtgttgggattacagacatgagccaccatgcctggccccatttttctttaataaacttattttagaacagtttaaagatttacaaaacaattgtgaagatattttagagcaggggtccrtaaccctagggcctcagactggtatcagtctgtggcctgttaggaactgggccacacagtaggaggggaatggtgggcaagtgagcattaccgcctgagctctgcttcctgtcagatcagtggtggcattagattcttatagcagcaggagccctattgtgaactgcacatgtgagggatctaggttgcatgctccttataagaatctaatgcctgatgatctgaggtggaacagcttcattctaaaaccattccccaccccatccatggaaaaattgtcttccacaaaactggtcccagtggtgccaaaaaggttggggaccactggtttagagaattctcatatgctaatatccagtttccctaattagcatcttaattagcaggtacatttgtcataatgaatgaacctttattgatacattattaactgacatccatacttcgttcagattttcttagtttttgcctaatgccttttttctcttccagggttccatccaggataccacattacatttttagttgtcatgtttctaggttcctcttggctgtgacagtttctcagactttccttgttttttgtgaccataacctgtttgaggaatactagtccagtgttttgtggagtttcctttaattgagatttgtatgatgtttttgtcatgattagaatggggttatgggtggccgggtgcggtggctcacgcctgtaatcccagcactttgggagactgaggagggcagatcacgaggtcaggagatcacgaccatcctggctaacacagtgaaaccccatctctactaaaaaaatacaaaaaaattagctgggcatggtggcgggtacctgtagtcccagctactcgggaggctgaggcaggagaatggcgtgaacccaggaggcggagcttgcagtgagtggagatcgagccactgcactccagcctgggcaactgagcgagactctgtctcaaaaaaaaaaaaaaaaaaaaaaaagaatggggttatgggtttttaggtggaagaccttagagakaaattgtcattctcatcatacgatatcaagggtacatattatgaccatgacttatcgctgttgatgttgacttgtatcacatgccttacacagtgtagtgtttgctgggtttttccactctaaaggtattcttttttccctctacacatatactgtattcttcagaaggaagtcagtataggtacctcacacttaaggagtggggagttttgcttcaccttcttgagcatggagtaactaatatttttggaattcttttgcaaaaattttctttttcctcctatttatttatgtatttattcattcagtaatgaatttatatcagtatggactcatggatatttacattttatccttttagttgtagtctaatactgctttatttattttgttgctcaaattgtttctgctttggccattgggagctctttcagttggcccttgtggccctttgatatatccccatcattatgatttcttttttttatttttgaacacttcctttctggtagtataagatgctccaggctcattttttttttttgagacagttgctgtctcactgtgttgcccaggctggtggagtgcagtggcatgatcacagctcactgcaacctcagcctcccaggctcaagccatcctcccacttcagccgctcaatagctgggactacaggtgcctgccatcacacctggctaatttttgtattttattttttagagatggagtttcgctgtgttgcccaggctggtctcgaactcctgagctcaagtgattctcctgtctgggcctcccagagggttgggattacaggcgtgagccaccacacccggccaggcttaccttgtacatttcttgcctcagtcctagaatcagccatttctccaaggaatactggttaccttattggagaatagtatttgaatccaaagcttggttcctagatgtgctcgttggagtatcattgtttatagggcctctcagctgacagagcaaggatatacatgtttttgtactaacctatgtatgtatgtatgtgtgcatatacatacacatatgtatatgtataatggcttgctttttttaattgcttttgaacagtaaagtgataaaattcaattattttttcttgtataatatatgtttttctgtgtaagaaatacttgcctaatgtaaggtcacaatactttatcctgttttttcttttacagtgtttatagttttaacccctacatgtaggtgtatggtccttttcaaaaacaatttttcctgaattctagtgtgaggtaaatatcttttatttcctttgtatatttttctagtacagtttcttgaaaatgttattctttctccattgaattgccttgccacctttggcaaaaattgaccatttctctgtgtgtctatttctgaactctattccatctctttcatctatatatctaaatttatgtcaataccacactcttgaaatcttgaaatcaggcaatgtgagtccctaaatttcttttcaagatttctttgctattctagttcctttgcatttacataagtattttaaaaccaacttgtcaatctttacaagaagagaaagactgccggaatttmtattgggattgtgttgaacctgttratcaatttaataatactgaattttccagttcatgaacatagtatttctttccatttattggatttaaaaaatatctctcaagattattttgtggtttccagtgtacagatcttgtatgtattatgtttattcccaagtatttcatgttttgatgctatgataattgatattaaaaacatttaatttccaatagtttattactactatatagaaaaagtttttgtttatatattgatcttgtatcctatgagcttactaactcagtggttcacttggcttgtttttaaaatatagacaaatataggaataactatttgtttttcataaataagtttttatgtggttgagaaggttgagaaagttcccttctattccttgttttccaggatcttttttttttttttaaatcacgaatggatgttggatttagttagcctctttatctgtatctactgagatgatcatatggttttttcctttttctcttaatatggtgaattacattgatttttttttaaaattatactttaagttctagggtagatgtacacgacgtgcaggtttgttacatagctacacatgtgccatgttggtttgctgcacccatcaactcgtcatttacattaggtatttctcctaatgctatccctcccccagccccccaccgcctgacaggccctggtgtgtgatgttctccgccctgtgtccaagtgttttcattattcagttcccatctatgagtgagaacatgcggtgtttggttttctgtcctcgtgatagtttgctgagaatgatggtttccagcttcttccatgtccctgcaaaggacatgaactcatccttttttatggctgcatagaattccatggtgtatatgtgccacatttcttaatccagtctatcattgatggatgtttaggttggttccaagtctttgctattgtgaatagtgctgaaataaacgtatgtgtgcatgtgtctttatagtagcattatttataatcttttgggcatatacccagtaatgggatcgctgggtcaaatggtctttctagttctagatccttgaggaattgccacattgtcttccacaatggttgaactaatttacactcccaccaacagtgtaaaagcgttcttatttctccacatcctctccagcatctgttgtttcctgaatttttaatgatcgccgttctaattggtgtgagatggtatctcattgtggttttgattttcatttctctgatgagcagtgatgatgagcattttttcatstgtctgttggctgcataaatgtcttctattgagaagtgtctgttcatatcctttgcctactttttgatggggtttttttcttgtaaatttatttaagttctttgcagattctggatattagccctttgtcagatgagtagattgcaaaaattttctcccattctgtaggttgcctgttcactctgatggtagtttctttttgctgtgcagaagctctttagtttaattagatcccatttgtctattttggcttttgttgccattgcttttggtgttttagttatgaagtctttgcccctgcctgtgtcctgaatggtattgcctaggttttcttctagggtttttatggttttaggtctaacatttaagtctttaatccatcttgaattaatttttatataaggtgtaaggaagggatccagtttcagctttctacataaggctagccagttttcccagcaccatttattaaatagggaatcatttccccatttcttgtttttgtcagttttgtcaaagatcagatggttgtagatgtgtagtgttatttctgaggcctctgttctgttccattggtctatatatctgttttggtaccagtactatgctgttttggttactgtagccttgtagtatagtttgaagtcaggtagcatgatgcctccagctttgttctttttgcttaggattgtcttggcaatgcaggctctttttttggttccatatgaactttaaagtagtttttccmattctgtaaagaaagtcattggtagcttgatggggatggcattgaatctataaattaccttgggcactatggccattttcatgacattgattcttcctacccatgagcatggactgttcttccatttgtttgtgtcctcttttattttgttgagcagtggtttgtagttctccttgaagaggtccttcacatcccttgtaagttggattcctaggtattttattctctttgtagcaaccgtgaatgggagttcactcatgatttggctctctgtttgtctgttattggtgtataggaatgcttgtgatttttgcacattgattttgtatcctgagactttgctgaagttgcttatcagcgtaaggagattttgggctgagatgatggggttttctaaatatacaatcatgtcatctgcaaacagggacaatttgacttcctcttttcctaattgaataccctttatttctttctcctgcctgattgctctggccagaacttccaacactatgttgaataggagtgctgagagagggcatgcttgtcttgtgccagttttcaaagggaatgcttccagctattgcccatccagtatgatattggctgtgggtttgtcatagataactcttattattttgagatacrttccatcagtacctagtttattgagagtttttagcatgaaggctgttgaattttgtcgaaggccttttctgcatctattgagataatcatgtggtttttgttgttggttctatttatgtgatggattatgtttattgatttgtgtatgttgaaccagctttgcatcccagggatgaagccaacttgattgtgatggataagctttttgatgtgctgctggattcggtttgccagtattttgttgaggatttttgcatcgatgttcaacaaggatattggtctaaaatcctcttcttctgttgtgtctccgccaggctttggtataaggatgatgctggcctcataaaatgagttagggaggattctctctttttctattgattggaatagtttcagaaggaatgataccagctcccctttgtacctctggtagaactcggctgtgaatccgtctgtcctggactttttttggttggtaggctattaattattgcctcaatttcagagcctgttattggtctatttagagattcaacttcttccaggtttagtcttgggagggtatgtgtgtccaggaatttatccatttcttctagattttccaatgtgtttgcatagagttgtttatagtattctctgatggtagtttgtatttctgtgggattggtggtcatatcttctttatcattttttattgcatctatttgattcttctctcttttcttctttattagtgttgctagcagtctatctattttgttgatcttttcaaaaaaccagctcctggattcattgattttgtgaagggttttttgtgtctctgtctccttcaattctgctctaaacttagttatttctttgccttctgctagcttttgaatttgtttgctcttgcttctctagttcttttaattgtgatattacggtgttgattttagatttttcctgttttctcttgtgggcatttagtgctataaatttccgtctacacactgctttaaatgtgtcccagagattctggtatgttgtgtctttgttctcattggtttcaaagaacatctttatttctgccttcattttgttatttacccagtagtcattcaggagcaggttgttcaatttccatgtaattgtgcattttttttttttttttacgagtttcactcttgttgcccaggctggagtgcaatggtgtgatcttggctcactgcaacctccgcctcctgggttcaagsgattctcctgcctcagccccccgagtatgtgggattacaggcatgcgccaccatgcctggctagtttttttgtatttttagtagagatggggtttctccatgttggtcaggctggtctcgaactcccgacctcagrtgatctgccctcctcggcctcccaaagtgctgggattacaggcgtgagcgactgcacctggcagttgtgcagttttgagtgagtttcttaatcctgagttctaatttgattgcactgtggtctgagagacagtttgttgtgatttctgttcttttacatttgctgaggagtgctttatttccaattatgtggtcaattttagaataagtgcagtgtggtgctgggaagaatgtatattctgttgatttggggtggagacttctgtaggtgtctattaggtctgcttggtgcagagctgagttcaagccctggatatccttgttaaccttctgtcttgttgatctgtctaatattgacagtgggatgttaaagtctcccattattattgtgtgggagtctaaatctctttttaggtctctcagaacttcctttatgaatctgggtgctcttgtatttggtgcatatatatttaggatagttagctctttttrttgaattgatccctttaccattatgtaatggccttctttgtctgttttgatctttgttggtttacagtctgttttatcagagactaggattgcaacccctgcttttttttgctttccktttgcttgttagatcttcctccacccctttattttgagcctatgtgtgtctctgcacgtgagatgggtttcctgaatacagcacactgatgggtcttgactctttatacaatttgccagtctgtgtcttttagttggggcatttagcccatttacatttaaggttaatattgtgatgtgtgaatttgatcctgtcattatgatgttagctggttattttgcygttaattgatacagtttcttcatagcattgatggtctttacaatttggcatgtttttgcagtgcctggtactggttgttcctttccatgtttagtgcttccttcaggagttcttgtaaggcaggcctggtggtgacaaaatctctcagcatttgcttgtctgtaaaggattttatttctccttcacttaggaagcttagtttggctggatatgaaattctgagttgaaaattcttttctttaagaatgttgaatattggcccccactctcttctggcttgtagggtttccaccaagaaatcagctgttagtctgatgggcttccctttgtgggtaacctgacatttctttctggctgcccttaacattttttccttcatttcaaccttggtgaatctgacaattatgtgtcttggagttgctcttctcgaggagtatctttgtggtgttctctgtatttcctggatttgaatgttggcctgccttgctaggttggggaarttctcctggatgatatcytgaagagtgttttccaagttggttccattctgcctgtcactttgaggtataccaatcagacgtagatttggtcttttcacatagtcccatatttcttgaaggctttgtttgtttctttttkctcttttttctctattcttgtcttctcactttatttcattaatttaatcttcaatcactgatatccttttttccacttgattgaatcagctattgaagattgtgcgtgtgtcacaawgttctcatgccatggttttcagctccatcaggtcatttaaggtcttttctacactgtttattctagttagccatttrtctaaccttttttcaaggtttttagctttttgcgatgtgttagaacatgctcctttagctcggagaagtttgttattaccgaccttctgaagcctacttctgtcatctcctcaaagtcattctccatccagctttgttccattgctggcgaagagctgtgatcctttggagaagaggcrctctggtttttagaatattcagtttttctgctctggtttctcctcatctttgtggttttatctaccttttgtctttgatgttggtgacctacagatggggtttttggtgtggatgtcctttttgttgatgttgatgctatttctttctgtttgttagttttccttctaacagtcatgtccctcagctgcaggtctgttggaatttgctagaggtccactccagaccctgtttgcctgggtatyaccagcrgaggctgcagaacagcaaatattgcagaatggcaaatattgctacctgatcctttctctggaagctacatctcagaggggcacccacctgtatgaggtgtctgtcagcccctactgggaggtgtcttccagttaggctacayggggctcagagacccacttgaggaggcagtctgttcgttctcagagctgaaatgaaatgctgggagaaccactgctctctttagagctatcagacagggacgtttaagtctgcagaagtttctgctgccttttgttcagctatgccctccccacagaggtggagtttgtagaggcagtaggccttgctgagctgcggtgggctccacccagttcgagcttcccagccacttcgtttacctattcaagcctcagcaatggtggacgccccttcccgcaccaggctgcagcctcgcaggttgatctcagactgctgcgctagtagtgagcaaggctccatgggtgtgggacctgccgagccaggcatgggagagaatctcctggtctgccggctgctaagaccatgggaaaagcacagtatttggtcaggagtgtcctgtttttccaggtacagtctgtcatggcagactgtcaaagggaaatcctccgaccccttgtgcttcctgggtgaggcgatgccccacccagcttcggctcaccctccgtggcctccacccactgtccaaccagtcccagtgagatgaaccaggtacctcaattggaaatgcagaaatcacttgtcttctgcattggtcatgttgggagctgcagaccggagctgttcctatttggccatcatggaatggaaggtgatttttttttaactgtttaatcagccctgcatttctggaataaacgctacttggttatgatgtattatcatttttaagttaattaagttaaggaaattctcctctattcctggatttctgagagtttttaacatcatgaatggatactgaattatttttaggatgtttttgcagcaagtattgatatgatcttgtgatttttcctggtctgttaattgattttctaatgttggactagtcttgtattactgggatgtatttcacttgrctataatgtattgttctttttatatattgctggattagatttgttaatattttgttaaggatttttgcatgtatattcaagagggatgatgttcctcattctgaagaaatttgtagcattcattgcttattagaaaagaaggaagatctcaaatcagttacttaacctatcattttaagaaactagaaaaagagaagcatgtcatatccaaagtatacaaaaagaaaaaaaattatacaaaagaaaaaaagtagaaatcaatgaaatagaaaacagaaagtcaaccaaaccaatagttaagttagttctttaaaagattaataaaatttatcaacatcaagccagactgattaggaatgtaaaagaagagtcagacatcactaatatgagcaatgagagaagggatgttttgatatatttttggtaatatctcctaatatgcttttacttttagctgtctatgctcttataattaagtacagtttcttgtaaagttttctgacagtcagtgagcctctaattcaagtgcttagacaatttgaatataatttttttttttttttttgagacagtgtttcgctttcattgaccaagctggagtacagtggtgctatcttggctcactgtaacctctgccttctggtttcaagtgattctcctgcctcagcctcccgagtagctgggattacaggtgcccgccaccatgcccagctaatttttttatttttaatagagacaggatttcaccatgttggccaggctggtcttgaactcctgacctcgtgatacgcctgccttggcctcccaaagtgctgggattacaggtgtgcgccactgtgcccagctaaatttaatgtaattgttgatatggctgcatataaagcaatcatctcgttattttctattcctttcatctctactttgttcttatttcttcttcttatgctatcttttgaggatttaaaaaaaatgaaccatttttttctccacttttgtcctattagctatacttcttttatttttttagtagttgccctaccatttgcaaaatacacttttggattatcatagtctactttcaaattatattaatattataggccttcatgtataatgtcagaagcttgtaacattacacttccattcattcctcacaatctttgtgctacttgtgccctatagtttgcacctgtatatgttataaaccccatgatacattgttagtatttttgctttaaacaattatcatttgaaacactttgaaaatgagataaaagttctttatatcttcccacttatttagagtattaatcacttgcattcttttgcatatcccagatttacatgtggtgtcttttttgtttggcctgtagaatatcctttaacattacttatagtgtaggtttgctggtgaaaaattatcccaatttttatgtgtctgaagaagtctttattttgcctttacttaatgaagacattttgtagttttctcagtttttagtttgtttcctctcttagttctttaaagagattactccattgtcttctgtcttgcattgtttctgaccagaaatctgctttaatatttttgttcattttcacatgtgtctttttgctcttgttgctcttaagattttattgctggttttcagcattttgattatgatgtactctgttgtatttttattcatatttcttttatttggggattgttgagcttcttggatttgtatgttcatagtgtttattaagtttggataatttttggctaatatttttattgttcatccatttgtctacttttatttgggactccagttacgtgcatgttggatcatttgatatttcccattcttctccagtactgtttttttctttcttttcctcctccttttctttttcttctttttccttttcttagtatttttttcactttgtcatttatttggataatttttattgctgtattattacgtttattgctattttcttctgcagtgccaaatttactgttaaccattttcaaagtgcctttaccttaaattattgtctacttcatctctaaaaatttttatttttatttatttatttttttttgagacagtgtgttgctctgtcacccaggatggagtgcagtggcatgatctcagctcactgcagcctccacctcccgggttcaagtgattctcctgcctcagcttcctgagtagctgggattacaggtgagcaccaccatgcccagctaatttttgtatttttagtagagatgggktttcaccatgttggccaggctggtctcraatgcctgaccttgtaatcctcccgccttggcctcccaaagtgctgggattacaggtgtgagctgctgtgcctggtcaaaaatttttacagttgtgttttctttccttcttttgctaatgctttcatatacctacctgaacatatagagtatgtttatatgatcgagtttaacattgttagctaacattaaaattgtttgctaattcggtcattgttgtcatttctgcgtttgttattatttggtatttattctggttgtgggccatattattctgcttacttgcatgtccgtacatccttcccaacatgtgttgttatctgtatgattatagccatccttgtgggtttgaagtagtattttgttgtgggttttgatttgccttttcctgatgacaaaagatgttgaacatttttctttttctttttttgagacagagtctcgccctgtcacccaggctggagtgcagtggtgcaagatcttggctcactacaacctctgcctcctgggttcaagcgattctcgtgcctcagcctcctgagtagctgcgattacagatgaccaccaccatgtccagctgatttttgtattgttagtagagacaggttctcaccatgttggccaggcttgttttgaagtcctggcctcaagtgatctgcctgcctcggcctcccaaagtgctgggattacaggtgtgagccaccatggctggccacatttttctgtttttagaattgatttttatctatttattttttagagacagggtctcactttgttgcccaggctagagtacaatggcatgaacatcttttcatgtgcttgctgttgatttatatatcttatttggagaaatgttaattcatattcttttcccatttttaaattgtgtcatctttttgttttagagctgtagaatttttttaaatatatattctggatataaatcccttattagatacatggcttgaaattttttcttccattttgtgtttttttccccctattttctttatggtgtcctttgaaataaaagttttaaattttgatgaagtcctatttacctagttttttctttggttgtatttttggtgtcaaatctgaaactattttgttatccaaggttatgaacatttgttgttatgttttctttgaagagttaggtagttttagctcttacatacagggctttggtccactttgagttaatttttatacatggtgtgagataggggtccaacttcattttcttacatgtggctatctaattgtcccagtaccatttattgaaaagactataccttctggccaggcgcggtggctcaygcctgtaatcccagcactttgggaggctgaggcgggtggatcacgaggtcaggagatcgagaccatcctggctaacacggtgaaaaccctgtctctactaaaaatacaaaaaattagctgggcatggtagtgggtggctgtagtcccacctactcaagaggctgaggcaggagaatggcgtgaacccaggaggcagagctcgcagtgagccgagatcacaccactgcactccagcctgcgcaacagagcaagactccatctcaaaaaaaaaaaaaaaaaacccacgaaagactataccttctttattgaattgttgtggcaaccttgttgaattgattataagggtgtattatttctggattctcatttctattatatcaatttatatatctatccttagctatatgtctatgttacactgtcttgattactgtagttttgtagtaagtatgagtccttcagttctgttcttttcaagattgttttggttattctgcgtctcttgcatttccatatgaattttaggatcagcctgtcagtttctgccaaaaaaagtagctaggatttgataaaggattattttgaattagattgatttggggagtattgccattgtaacaacattaagccttctggtccacgtacatagaatgttttccacctatttaggtattgaattaaaaattttttcaatgtgttttacagtttttagcatacaagtcttatacttcttttaaaaatgtatttctgtttttttgtttttgatgttattgtgagattttcttgatttcatttttagattgtttatcgctaatatataaaaatccaattgatttttgcacattaatctcatatcctgcaaccttcctaaacttattaattctaatttttttttagtggattctttaggattttctacatacagcgtcatgttatcttgaaacagacaattttacttcttcttttccaatctagacctacctacctaccttccttccttccttccttccttccttccttttctttctcttccttccttccttccttccttccttccttccttccttccttccttccttccttcctttcttcctttctttctttctcctttttgtctaattgtctggttagattgtacagtatattggtgaataggtactgagagtggatatccttgtcttgttcctgatcttaggggaaggcatccagtctttcaccattaattataatgttaactctggactttttttttggcgtaattatggtttgctggagcctcaatctcctaggcttcagtgatctccaacctcagcctcccgagcagctggcaccacagatgcataccaccacacctggctaagttttaaatttttttgtatagatggtgtctcactgtgttgcccagagtggtcttgaacagctaggctcaagtgatccttccaccttggcctccctaagtgttgggattacaggtgtgagccactgcgcctggcctggccttttcattgatcccctttgtcaagttaagaagttcccttatctagttttctgtttttctcatgaaagggtgttggattttgtcagatgccttttttctgtgttttttttttgatacaatcatgtttttttccctgtattttattaatacagggtattacattgattttcagatattaaaccaatcttactttcctcttgtttgtgatatacagtcctttttatattttgctggatttgttttgctgctatttctttgatgtttttttggtcaatatttacaaagtatattgatctgtactttgctgctgatatctttgtcatgttttaacatcagggtggtattggcatcatactatgtgttggaaagtattctctcaccttctagcttttagaaaatttcatgaaggactgacattaatactttttttaagactaatgatattttaatttttgtttttgtcttttaggattctccttttacaaatgcaggaatgggatctaatctaaatctgttaggtgaaattgagtgtgatgccagcataatggatggaaaatccttaaattttggagcagttggagcactgagtggtatgtgggcattatgacctactatctttggaaaatcatgcacgtgaccatttcatgccttctaaagatgattacagtctttttcaccatttctgcttggaatagtgtttaaaacaaatgttctttttttattgaatttaaaacatacagtcttagttataagtagtttttggtttgaatttgatcattctcctgtatcccttgaagagattaaagacatttaagacatgatttagaatattaattttacaatttgaaatacacactatattttttgttgtaaaaaatttcaggtaatataaataaaatttacctttgatcctccaraagatcttttctttctcatttcctttccccgtggggtttaaccagtaaaaatccagtgcttttatctatatttttatgtaacagaaacacagttttattttgtgcctgtatttgttttcttaaaaaataaatgtgttaattattataaactttttagatttaaatataatcttttggagattttttccacatcagtacataaaagatatgtctcatgttttataattcatttattaaagcaaaatatacatgaagtatgtattttatgtgtacagcttcatgaatttttagatgtagacaccatataagccaccacctagatcaagacattaaacatttccatgtcaaaaggtagaacattttcataatcctggaaggaccccttatgcttctccttggtccatacttcttgtgctctcttccctcatgctaactttgggtgccatagattaatttgcctgttcctaaaatttacatgagtgggatcagacacttctgtgtctgttttcttttgcttaatgttatgcctgtgagatggatccatgttttgtgtcagtagtattttattttttaccacttagtagtatttcattgaatggatataccataacttctgtatttactctcctcttaatgggcatatgaaatttctagctttttacttttttgagtaaagcttcagtgaatattattttacatgtcttttggtagacatatgtacttctgtttttttttttttttttttttgagatggagtctcattctgttacccagcctggagtgcagtggtgcggagtctcattctgttacccagcctggagtgcagtggtgcgatctcggctcactgcaacctctgcctcctgggttcaattgattcttctgcctcagcctcccaagtagctgggattacaggcacccaccacagtgcctggctaatttttgcatttttagtagaaacagggtttcaccatgttggccaggctggtcttgaactcctgacctcaagtgatctgccagcttcagcctcccaaagtgctgagattataggcgtgagccactgtgcctggccacgtatgtacttctttaggtacatatgcatatatattttgttttaatagatactgccggttttcaaaagtaattgttgcagtttatactcctactagcagtgtaggagcttttcagttactctgcatccttgccaatttttggtattgttaattgtttttaaaattcagccattttgatatgtgtgtagtggtattattgagtgtccctagtgatttatgtgtgtagtggtattcaatttgagtgtccctagtgacttataagagccttttcatatgctttttgaccatttagatagccttgttgagaagtgcatatttgcatcttttgcagatttttatttgattatatcttttattgatttgttggagtattttaaatattttacatacaaatcctttgtaagatacatgtattatggatatcttctcccagtctatggtttgcctttgcaatctcttaatggtgttttttgatgmatagaagtttctgattttaatgaagtttaagttagcaaccttttcttttgtgattaactctttgtattttaagtttttgcctgttcaaagttatgaagataatcttcattctttctgtaattttattgtttttatccatcatgtttagctttcttatcaagctcagattaatttttgtatatgtaacataggggtcaacatttatttattttttcctcatatggatatccaaatggtccattgccctctattgaaaggaagtcttttcctcacagaattgtgttgggaaattaggtgactgtgtgataatttgtttctgtaccctgttatggctgctttcaaaaatgagttgggtacttttttttcccccattctttgaaaaggtttgtatatgattggaataattactttttaattgtttgaaggaattcataaattatttcaaattaacggggttttctttgtgggaagttttaaaaagtaggattcaatatttttaacatttatatgattatattttatttttcatgtgcgtttttctaggaatttgtctatttcatatgagttgtcaaatttatttgcctgaagacattttagttagctttctttgttgatttctagtttaattccactgtggccagagaatatactatgtatgataccaatcccttgaagcttttagagacttgctgtatggcccagattatggtgtgttttggtaaatttccacrtgaacttcaaaagaatatgtattctggagttgttgagtacagtgctctgtgtgtgtcacttaggtcaatttggttatttatttgttctgatcttttatatcctttctttttaattagttttaattttagtttctcttattatgcagttttattggtatttaataaaatttcgtgtgtttgaaggccattagcatttctctgtgtactacctgttcatacctcttgtgtggcttgcgttttaaccctgtttataaatgtccttaatcatattggaattaaacatttttgtttgtcaaacttactactttctcttttgtggcttttgtattttgtatttcttaaagtctctcataatttataagcacaatttacttgtattttcttctaacatatgtatagtttatttttcatttacctcttgaatgcatttttttctgaaatgacttcaaattgttcctacatagttaattgaataacaataagtacagtttgttaaatgacagtaataccgtaggcattgttctacagtggtttacatatttatttatttatttatttttgagatggagtctagctctgggtgttggccgaggttggagtgcagtggtgcgatcttggctcactgcaacctctgcctcttgggttcaagtgattctcctgcctcagcctcctgagtaactgggataacaggtgtgtgccaccacgcctggctaatttttatatttttagtagagacgggtttcaccatgctggccaagctggtcttgaactcctaacctcaggtgatccacccaccagcctcctaaagtgctgagattacaggcgtgagccaccgcatccagcccagtggtttacatattttaaatcatttagttctcacgatacccttatgaggcctatgcttttatcctatgtaataccgttatgaggcctatgcttttatcctatgtaataccattttgaggtctatgcttttaaatcatttaattctcacaatacgctcatgaggtctatgctttacagatgaggaaactgagacacaagagagatttagtagtttgtccaaggacattgtattagtctgggtaaaactagaagacagaaaccataccatagtttaaatagaagtttaatataaagagttattaagcagtgattgaagagtaactctataaacatgggacgagaactcaaaaatgtatcctagggcagagagagaatacccaaagaagaacacgtttggaagtacgtttagacgtcattgaagaaggtgtggctatcattcactgtatggcagagaagttgctgggttacccaggycagagctggtctacagtcattgtgtgagtaggatcaatcctgtgaggcagaggcaagctcaggctggtaggtgggcacacagaggtcaagatgctgtgagaattaaacctcccttgggcaggataaagattgggctttggctcactacgcaggcaccccgtggaacacttgctatgtgtgcctatggggctgaggagtgggtgtgggtatcaatgacctgaattggagtatggtctcattctttctggagctctcagctatgctgctgtggcacaaatcaggagctggagaaaacgtggtgttcaaatgctggagaaagctgctccctgtgggcacttagtacaggagagtaccacattggtcagaagtgaagcctggtgcgcaagacaacactttcctcctacagtgtttctttagtgtcctctactgacaaagcttacctattgtgctagctggcaaaggaaacgtacttagagggcccatatccattttcacacatcaggcaataaagggtgaatttgtagctgagaagcaataaaccggttaactggaacagttacaaagtagtctgactcctaggcttttacctttgtgttctttctccctcttatatgtagtttatccttttcctactgatttgaaatattaaatacctaaattcaaaagtgtttgtttctgaactttagctttattctatttcattgacatttctttattttgtactcaaaccactgttttttaattagaatagcttcaaataaaaaaatgatatcttgcagggtaaataactcttcatttttctttttcaaagttttatttttctgattaagagtcagcttcttatgtatcctggaaatcattttgaagttttgatggagaattggatttataagttataaattggatttataagttgtgttataaatgtataagttgtaacttataacttataaatccaatttataagttataagttataaatttataagttataagttatacatttataacataaattgttaatttgtaaacaatataaagttataaattggatttataagttggagtaaagatttggatttataagttaacttggaaaagatgaatgtctttacaatattgaatcatcacatctagaactatattgttttaagaactagtaaagggatctgatttgggcttttctttttttttttttttgtatttcatactttttttgtggaagatttggtattgagctacatttctacaattggtttttcttggagtctgttggccttaatttaaatttttgtagtctctttatatatyccactgatgatttgtttgtattaatcatttcctgaaaggcaggcgtatattagtgatgaagggtatggtctccgatattggctgcctccatgttaaaactcagcgctgtgatcatgggcaggcaacttaaccctctgtataaatgttttctcattaatcagataggattaataagtgtrgttacatgacagaattgaaggatcagctaactcatccgatagatttaagaatttggcactgggcctggagcacattaggaaatagttactttgattgccttccaccatcatcatcattgtcgtcatcagtgtcattgtctttgtcattgtcatcctgacagtgtttatcacactcaaaactgtcctgtcagttctcctggataagcactatcacctcacttgtacatactggttagcctcttggaaagaatctgaaccacattttaggttacaatcttttacacagttggcctcttctcccacccttacccaatttgaaggacatttccccgttctgtctctcttgtaggtgacatttaaaatttttggcttatttttcccccattaatttttctctccaaggtcaatttgaagctgtttataatcatgtttactctttaaaaggaatttatggttttgtggtcactaaatgcctggagcatgtatatagttttgatagtaagatagtaccatattttcagttcattttaaaaactctattctgaaatctattaaaaaggaacctaatttaaatatgtagtatttcaattcagcctttgcttctatagcacgtgacaaaacatgagaatatgtattttatattcgttcttttcttctaggttttcatacattttttgatttaactcttattgctcatggttattaagggttttcattagtattatttgatatatcgaaaaagaatttccaagatatattcaagttgttttattgaaacaactgcaaaactgagtgggaaactagaagacatttctgacatcttttttgccaattttttttttttttttataggaatcaagaacccagtctcggttgccaacagactcttatgtgaagggcagaagggcaagctctcggctggcagaattcctccctggtaaccactttgttcttcctgactttccctgtctttagtgcatttttatccacagaaggctgatgctgttggttacataccaggtagcatgcctttgcgaagaagacaaactttgttccgtgatcttggaacattttgtacagctaataaagttttggatagaaaagaatattatggattaaagcagaaaggggatcagtgttcaactgggctcattttattatgaaacttaaaaaaaacttacacattgtagtccagagtctaaagtaatttttaattttgagaagttcttagaataaaagtacatggaacatagtaaatagcccttataaacctgtgatacagctccaattaccagtgttttgtacttcatctgtttcatgcatctcagtttttttcctatagggttttttgtttttgtttatttttattttgttttattttatttttgagacagggtctcactstgtcacccaggctggagtgcagtggcacagtcatggctcactgcagccttgacctcctgggctcaagagatcctcctgcctcagcctcctgagtagctgggactacatgcatgtgccaccgttcctggacattatttttattttttgtagagatggggtcttgttatgctgcccaggctcatctcaaactcctggactcaagcaatcctcctgccttgrcctcccagagagctgggattaacaggcatgagccgctgtgcctggcccctatagtattttaaagcaaatccctgacattgtagtttacccttaaatagttttgtaagtaattctgtgtttgcacaacatagccaccgtactgttagcatgcctaacaatattaaaactttatgctttaataccttgtcacacttagtctatgctcagcatgcctggttgtggaggttacattaatgttctgtgttcaaagttgtggtgacagtgctgtaggaatcactttgattctactgtgttttgaagtcacagaaaataaattaatatagtttagaaaaatcttaaatcctttacccagatagatttcagattttaattatatatgtcccagtttaattatggcactagagagtcaattatgaaaaaaatctcaaatatcaatttttaatattatgtgtttttgataaagcagtggtaagggaaagcaaatctgatttattgagatcctttctaatatgtgttggatggatttcagtaagtttcctgataactctgaaagtgagaaaagccgggcgcggtggctcacccttgtaaccccagcactttgggaggctgaggcgggcagatcacgagatcaggagatcgagaccacggtgaaaccccgtctctactaaaagtacaaaaaattagccgggtatggtggygggcacctgtagtcccagctagaggttgaggcaggagaatggtgtgaacccaggaggcrgagcttgcagtgagctgagatcgcgccacttcactctagcctggccaacagagcgagactccgtctcaaaaaaaaaaaaaaatcttacacttgcttctctaatgatttatattaaacccatgctattttgtttaactggtatgagattaccaatccataatttactaagtgtttgttcagtaggtgcatgcggagtccttctagccatacctttttaagggagtaataagtgcaaagagattgtctctggatttatattctctgtaatgtgcatttaaacatgactgtgttctttcacccaatatttcctattgtgtgtaaaacctaattaacatgaactaaacaatttagaagatatgtacccagtagggagaaaaagatgtagttgtttggttggcaagaaaaatagcataaaccatgtaaaaagtattttgaagttcacctacgaatctaccataatcccattgaccccactcctcatggcrtttaccaagcagattctcaaatttatatggaggaacaagtgtacaagaatagtcaagacagttgtaaaacagatgaaagagttggatgtacttaatggatagcatgatactgttatataatactatagtaattaacacaggttgatgtagatatggataaaaagatcagtaagaactgcaagtctagaagctgactcagtgcatgagggaatttggtctatgataacagtgtcatctcaaatcactgtggggaaaaagaatgatgtattaaataaattgtgttggggcaattgactacctagtgcaagaacattaaattccgatgtcacatcactaagaaaaagcccaaacccaaaagtaaaaaagtgtagtataaaaatattaggaaaaaatatgggagagtattcttatgactatgaggcagcaaaaaatatattaagataaaaaataaagctaagtattgaaacatatgacaagtgaagatgtatacctattatacaagtgaagatactacgatcagaattaaaagacagtatgtcctttggaactgagaaaaattatttgcaggatatgtagcaaacaaaagattatccagagtatttatgaactataaaatatcaataagaaaaagacaacccaaattttaaaaatcagtaaaggatacaaataggcaatttatgggaaagaaaatattaatgagatataaatacattaaaaggtgcccaataatattaatcaaggaattgttagtaaaaaaaaaaaagatgatattttcactattttcaagtagcaaaattaacaaaaaccaacaatgtgcagtattattcagggtgcagaaaaatagattcttctgctgttgatgggaacataaacagccagttgagagacattttggtattatttattaagtacaaattgaaaagggacactgtatgctccagcatttctatcctgagacaaaatgccttcatgagaaggcttgtacagcacatgaaggctatagcattgttgcttgtagaatataaaaatgtaagctacctaaatatccatcaatggctaaataaactgttttctagttatattattagataccctgtggcattagaaaaaaggagagaaacatttgtgtatagtaacatggcttagtgttagaattaatttacttgggctgccttaacaaaataccttagattcagtggctcaaacagtagaaaagtatttctcacagttctggaagttaagcggtccaagatctaggttcccgcctgtttggtttctggtgagcgttccttttctggcttgccttctcactgtgtccttacrctagagataggggtgtagggaaggggttgttgagagagagaaaaatttctttcttataaagacactaataacatcatgagggccctaccctcattttatccaactctcattatttcccaaaggccccatctccaaatattatcacactgagggctagggtttcaacaaatgaatttttgggtggacacaattcagtgcacagaaatagacctcacattgtagggtaaaaaaatcaagttgctgatgatgtgttcattttaacttctgttttcttaaaaagattacaaaacaatgtgatgcatacctgttttctgccatctaggataggaaataaaacaccaccaaaagatttggagctgcctagactaaactctgccaatttacatttctacctacaacgtcttatgatcattcaacraaacacttaccaggagtaatataacatttaaaaaatctttccaaagttagaagagatttaacatgtactccttgttccttctactgtcccccatgctcaccgtgacccccatctctgccctacccctaggtaacaataaccctgattttctcattgccacgtattctttcatattattacagcatatacaatactctaattttctttggctacataaatatgtgcatagatgtacaaaaatgacttgtaaagtaggttactaaagccactgtgattacctcaggggaagagggagtaagatgaggcaattgtcaaaggggacatatgcaatattttaatattttacaaagagaaaacatatgggagaaagtgatggctgcgtctttattaaaattatataataatgctacacttgtctggaactagctggttttctcacaaacatagttttcaactttatgtttgattgttctgatattataggtatttaacattttcatatgaattttagaatttgtttttccatttctgtaaatagcctgccagaattttgattgtgattctaatatatgcatttattaagatttttaaackctcccaactgtttyatagtttccagtgtatagatcttgcacagcttttattatatttatacctggtacttcacttttttttgatgctgtggtaaatggaaattaagcatgttaatttccaactgttcattgtcagtatatagaaatgtgattgattttaacatattgacattctatcatgggaatttggtaaatccatttgttttagtcccatttttatagattccataagactgactttctttctttctttctttctttctttctttctttctttctttctttctttcttcctttctttctttctcttttctttctttctctctctctctctctccttcccttcctttctcttctcttcccttcctttctcttctcttatcttcccttccctccgctcccctcccctcccctcccctcccctcccccttctgtctcggaatcttgctctgttgcccaggctggagtgcaatggcatgatctcggctcgctgcagtctctgcttcctaggttcaagcgattctcctgcctcagcctcctgagtagctaggattacaggcatgcaccaccatgccctgctaatttttgtatttttagtagaggaggggttggccaggctgatctcgaacacctgaccacaggtgatccgcccacctcagcctcccacagtgctgggattacagatgtgagccaccgtgcccagctaagattttttacataaatattatgtctcctgggaatgaatatagttttatttctatttctaacctggattcttttaactaatttttttcatgctttattgcattgtctggaacctccaatgcggtatatggtagagaagtgtgagagtggacatcattcccttctttgtgatattaaggaagaagcatttggtctttcaccattaagtaagatgattgctgtaggttaatcacagatgctcttgatcatattgagaaagttcctttcttttcctaatgtattacctcatttttatactgctatgaactaatacccaggactgggtaatttattaaaaaaagaggtttaatggactcacagttcgacatggctggcgaagcctcacaatcatggcaaaaggtgaaggaggagcaaaagtccctcttacattacatgatggcaggcaagacaacgtgtgcagaggaactaccctttataaaactgtcaaagctcatgagatttactcacaagaacagcacgggaaaaacctgctcccatgattcagttatatcccactgggtccctcccatgacacatgggtattatgggagctacaattcaatataagatttgggtggggacacagccaaaccatatcacttagtgtgctgagaactttagtaggaataggtattgtactttgtcaaatgctttgctgcatctattgagatgatcttataatttaaaaaatttagttagctaatttagtgattctttgatttttgactgacaaagcagcacttgcattcctgggataaattctacttggtcataatatattatcctttttatatattgttggcttcagtttgctaatatttggtaaakaatttttacatatatgtttatgagtgatactggtttatagttttcttgtaataactttggtttgggttccttttgctttttggatgtgtggggatatatatttcatcaactttgggaaaaaaattcctcattatcttttcagatatttttttctgaatccctgtctcttctattcagaattctgattacatgtaatttcagcctcttgtagtagtttacagatcactcatgatttgtttacttttttcattgttttttctctctttgtttcattttgaatagtttctattgctatcttcaagtttactaattatttttctgtctaatcacttaatgtctaattacctgctaatcccattcagcttgtgttttatttctttatgtattgttatttttatctctacaagtttgatttgcatctttaaaaaaatgtcttccatgtatctacttaacatggttaaactttcctctagcttcctgaacatatgaatagtgttataacaactatttaaatatctttgtttgctaattctgttatctttgttatttatggattgttttcgattgaatgatttttcacctcataataggttacctttcttcctattttgcatacttggtaatttttattgggtttcagacattgtgagttttacctttttgggtgctgtgtatttttgtattttaaaaactwttcttacattttattctaggatgtggctaagttacttaaaaacagcttgagcctttcaggtctcgctttaaacttacatgagacgaaaagcatttggccttgagctaattttgccttgctattgaggtagaatctttcaaagtattataacagatgcacctagaatgaggcctttactttggctggtgggagcaggagctgttgttcctggctgtctgaacttggggactttgtttctttttttttttttaaactttcatttcatttgttccagtgctttgggtaatttcttcttacacattcactgatctctacttagctgaagcttagagggatactctctgcagatctctagcgtactctctatatgcagctttctcctctctggtattgtgaactctggctacatggcctctctggatgcccgactatgtcacttcaactcagagatattgctggagctgctgtgctgtggtttagaaactctctaggcagtaatgaaggtgaactctatgattgcagtaaggcagtcacaaggtttaccttgttttcctttctctcaaggattactgtcctatgcctaatgtcttaacgtctgaaaactgttattttctatattttgtcttttgtttttttcaccacttcaaataagagggtaactttgttccctgttactccatcttgtccagaagtgaaaaatctctcacatacctggaagttcactttctagattataatagaaattagatgactagaaatatttggatcacatgtaaataagctcaaagtaaaaacatgataaatttggttatgttgatttagggtactcagggaattttttaaaactatattacatttagacagtgaactctagagagtttctactataacaaaacaccttaatatcataaactagttagcttataaacaatacaagtttctcacagtcctgaaggctgggaagttcaagatcaaggagctgggggattcagtgtcccattaaagggggcattcaagagggctaatcccattcaagagggcttcaccctcatgacctaatcacctcccaaaaggccccacctcctaatgcaatcccaataccttgggggtgaggtttcaaactatgaattttgggggaacacagttgtatatgttagaacatttcaataataaaaaaattaaaacagagtccaaaagagaacagttataatttggttgttatgtgttatttccaagtatagcaagtttttctttatttgcattttatgtgttgataagctttaaataatcaataaccgaagttatctttcttcagttttttgtatttatgaagagtaaagaagtcatagataaaatggaaatcagttcttgagtccagagaattagttatgttctcccatatctttctctttgaaaacaatgtattttgattacgggggttcctgaagatccttgagcgctttctgaaccactaaattacacattttagactgattatagtcatgattctttgaaaatgggaggttcgcatccatgagaacatccacgagattgtaattcacatgagtacatccatgagattgtaattcctatcaccgtatttgcccagatagtccgtttcagggtgttttctctgtcagcacttgcagctcagttcttgagagttttttttttttttttttttgagatggagtctcactctgtcacctagactggagtgcagtggcacgatcttggctcactgcaacctccacctcccgagttcaagcggttctcctgcctcagcctcccgagtagctgggattacaggtgcgtgccatcacacccggcatatttttttatagttttggtaaagacagggtttcaccatgttggccaggctggtctcaaactcctgacctcaagtgwtccacttgcctcggcctcccaaagtgttgggattgcaggtgtgagccactgcgtccagctgagagttttaattacctcacctccgtggtggtttcagtagagtgttgctttttgttttgtaaccatttagatctgctttaatgtaaacgaagatgggtataacacaaggaaaatgctgtcctttaatctagagaagtttgwcactctattattttgtttaatatcttgacaatttttatttaatgtttagtatgctttaggcactgttctaaatgcttgagatatgttgatgaagaaacgaagatctccacccttatgaagctcgaagcttttaaggactttatacagaaataaactaacagatacaatgtgtaaattatcaattatgtaatatgttagaaggtggaagaaggtaaaaggagcaggataaggagattgtgagtactgggtagaggagtgcagggtagtgggatgcatttttaaggaagcctcatgaaggagggatatttgagcatgtgaaggaatttcccatttgggaaatagggaaagagccagacagagggaacattcagggtgaagaccctgaggctggagcctccttggtatgtttgtggctttacacgacaatgagtagagtacacaaggaggtaagagcaataagagatgaactggggagcggtaaggatcagattccatgggagcttgtagatttttaaaaagaccctagtttttacactggtcctcacaagaggttttacaggattttgaaagaggagtgccattacctgacttgtattttacaaggattttagtggctggtgtattgagaattgactgaggtcagggaatacagggcaaggcaagcataaaaatagtggggccactgcagcattgtaggtatcagatgatggtggctcagaccaaggtggtagcagtggaggtggtgagaagtggtcagattccagatatgttataaaggtagagtcaatgggactttgaagtagattggcgtgaaccttttctaaaagtttcctcctcggagaatcagaagaatgcttgagagaaatttgaatcggtgctgcattcaatgtttagaaatgtgatttttttgacatgtcagtatagtttttagtaaaagcttctgctaaaatgatttcaaaagcaattatatgatattttgtgtgatgatgacctactatacaatacttttttatgttgaggaaagggtagatagttagtatccttatccataagatgacatccaactatttgccttcctatgaatattttacagtgcccgaagtatttaaaaacttaaatagttgacaatagcaaattgattttacttagaatcaaaccttcgaatgattaaaaaatatataaaataaagctaagaatattttgtaaaatgcccctcactgattccagatactggaattgaacccaaagtgaccaatgggagtgctgagaatattagattaactccaaacttttgtcttgatcatgtagtttactacttcaacttctcttttacatcttctcatgaacagaattatttcttttatcagtttttttttcctagaagaaggaaatgctaaaaatgccatcaggacagttcaaatttgcgtccaagctcctatttcagtcatcttaacatttgaagtttatgtgacggcttttctttggagaggatttcatttcgtacaagaataggaaaaactgttttctattcttagaatcctttagaattttttttttaaagtagaattttgaagaggtaaagttgtttattctcattggccttctctcctctctatttaaaatagtccctccatccccatctttatgtatattagaaagcagttattgagattaaccatttggtttcccattggaaccatttggatatgtttctgagggtctacttagattttgttttgccagtctgtcactggtcttattagcagtcaaatcttaagacttcaatatgtgttacttcgagtttttaatgttggaatgattaaaataacagaaacaaaaaaatagggagtggaaaactagcaagtaggcacaagttcaaggaatccattactagctggctgagatctttaagaagttggctatggaagaagatggagtgattaattattatggtaactgcttgctattactatttgcttagtcaaattacttagggaatggggtaattatcctacatgctatttgaaatctttgaaaacaagtcttttatatttagctagcaatatccttttatccactttgttatattaaaacttgctatttaggacttaaaagttacttttgggacataccatagtacttaccacagtaaaagtgattctgaaggttatgtatgtattttcgttgcatcagggcttagaaatgtaagcatatatatttgggcatctccagatgtacccactaattttggatggatccaggtattctgctaggtaataatgccaaatctgaaggcattcacttaattgtaaactgttaatttgagtaaccaatcttgtgacattaactgagaaccctgttggtccaagataaatcttaatgttttctactgagaagtcaaccatttttacatcttattatgtttgagtttgccaatttttactagttagttattgcaaatggtattgtaacattccaattgtaaaatttctaatttggagaaaaattttcaggaattttttagcatgcagtcatcttactactttgaggtaaatctggaattatgtccatatgcaagactttttctcaactgccttaccatattacctatatttattgaatatgtaggagaagatgacactgtgaattttaaaaataatttttctgttgttagctttttagttggagaaggagcctacagatgggcagtagatcatggaataccctcttgccctcctaacatcatgaccacaagtgagtaaaaacttaaaaaaaattaarctatatgagcatatatacctaaagtataatattgcttctgttatgacccatgtagtacagatatttatggaagaatacttatatgttgaaagatttgtagttaaaagctacgtagaaagttatttcattttaaaccacctttgtattcctgaggtcttctcactgcttccttatgcttttataaaagtattactaaaagatcccttttagagattacttaaaataattactactaataaagcattaataccacccttcaatgagagagagagatggagagagagagagagaagaaaatataggtcaatatttaacagtccttgagctgagggaaggactttttagatacaaatgcaagggaaggaaaaacaaaggtgtgactacatagagttaaactgaaaaacagttatcacaaatatgacaaagggataaatatccttaatctatgaagaaatttaccaaattaaaaacaacacaaatacaagtaattgcccaatataaaaatgatcaaaagtcctaagtagataatataacataactgacaggcaaattcaaattaaaatgagtacatgttaaatttgttcccttttaacttttgaaagatttaaaacatattactcctggtaagtgtttggttaaataatcatagtacattgtaagtataaatgtgaattggcagagattttagaggacaactaagtagtacagataaaaagctttaaaagccttgttctgcttctgggaacctgtcactggagatagacaaagatttatgtagaagggtgctcaagtgagcattattaagaatatacaaaattttgaaaaaaatcttatacccaacacaggaatatgagtaaataaatgatcatatattcttataatgaaatgttatgaagtaactagaaattgttatgaagactaatctctgataatgattgaatctaatgactttaaaagagtgaaaaatgaagttataaatatgtatatgtttgtgtatatgtctgtttaaaaatatttgcataaaatgagaaagaaatattaaaaacactattttttaaataaaaattttatttttatcactgaaatctgtgaatataatttaaataatcaaatgaaaaagtgaggattaactccaaggaaaccaacttagttaaatagggtataattagccaggtgtggtcgtgcactcctgtactctcagctacttgggaggttgaggcaggagaatcctttgagcttaggagtttgaggctgcagtgggctatgattgcaccactgtattccagtttgtgtgacagagcgagaccttgtgtctaaaaaaaaattatattcagaatgaatattcatgtaatgctgaaagttgtaatatagggaggctagagggaagagaaatgtgtgtgtagcagtagggctgaaatatgagagttttaaattcccatgatccctgtcactaattatgtcttacagtctttccaatggaacttattttacagtccttatatcaggcaaacaaattaggtcatctgtcagttccctttttttcccttggagacaggccacctggccccttccagtctcgagtcttactaggtctgctgtgtggctgccatcctggactgtgccttgcttcaccttgtgatctccttcgcctctctccagtatcaggttctctgtttcctggatctcatgtgtttttcttccttgttttattccttattcagtacatacgagactgaaaatcagtttcccttaggtttttgaggaaattgttctcttatcatctggtttccagtcttgctattattatgcaagactcacaaatattgtggtgtatttttttctctttggaaggaagctcttaattcccatgttttgatgatcacaatgaagcatcttggggcattttttttttaattctttatgttgagtgctcattttgcacattaagtctggacatttatatgcttcagatttggagaaattaaaagaaaattttgggataatttcttccttcacattttctgtattttattttccgaatacctattttttaaacacttttaattttaggggcacatgtacaggtttgttatataggtaaactcatgtcacaggggtttgttgtacagactatttagtcacccaggtattaagctaagtgccctttagttatttttcctgatccttttcccccctcccacccttcaccctcagttaggctccactgtcttttgttcctctctgtgtgtccatgtgtttccatcatttggctcccacttataagtgagagcatgyggtattttttgttcctgtgttagtttgctaaggataatggccatctccatccatgctcgtgctaaagacatgatcttactcttttttatggctgcatagtattccatggtgtatatgtaccatattttctttatccagtctaccattgatgggcatttaggttgattccatgtatttgctgttgtgaatagtgctgcagtgaacagatgcatgcatgtgtctttatgacagaacaacttgtattcctttgggtatatactcagtaacggggttgctaggtcaaatggtagttctstttttagctctttgatgaattaccacactgctttccacaatggctgaactaatttacacttccaccagcagtgtgtaagcactttttctccgcaacctcaccagtgtcttatcttttgactttttaataatagccattctgactggtgtgagatagtatctcattgtggttttgatttgcagttctctaataatcagtgatgttatcttctttcccaccttaaccccgatagccactaatatattttacatttgtataattttgtcatttcaagaatgtaatataaatggtatcatacagactgtaaccttttggtatttgcttttttttttttccttcctcactataactctctggagataacatccaggttgtgtttatcaatagcttgtttttttttcattcctgagtattcatggtatggaggtactactactgtttagccatttacccatttatgtctgggttgtttccaatttttggctattatgaataaagcttctgtaaacattcttgtactttttttgtagttctttttaaaattatggtaaaatacacataacataaaatttaccatcttaaatatttttaatggtatagttcagtagctttaaatattttcttattgttatggaactaacagtaccatcaactatagaaccctcttcatctcgtaacaccaaagctgtacccattaagcagtaactccccatgtgccttccatttagtccctggctagttcatttttgtctctatgaattctgcttttataagtggaatcatagagtacttgtccttttgtaattggcttatttcacttagcatgacttcttcaaggttcatccatgttgtagcatgtgtcagaatttctttttaaggctgaatagtgtttcattgtatgtatataccacattttgtttatctactcatccactgatgaatacgtgggttacactaccttttggttgtcatgcataatgctactgtgaacatggctatgcaaatatctgtttgagtccctgctgtccattttttttgggtaccccgaaatggaattgctggatcacatggttattctatttttattttytgagaagccaccatattgtctgttttccatagtggctgcaccatttcatgttctatcaacagtgcaccagggttccagtttctccatacccttaccaatacttgttctttcctttactttttaaaaaatagttggcatcctaatggctgtgagttggtatttcattgtgattttgatttgcatttccataatgattatgctgttaaagtgtctttttatgtgcttattggccatttttatatctttcttagagaaatatatatcctagtcctttgcctatttttcaatcagggtttttcttgttgagatataggaattcttcatatgttctggatgttaacacttatccgatatgacttgcaaatatcttatcccattccacgagttgccttttcactccattgattgtgtctttcactccattgtgtcttttaaatttttatctatttttttcttttattgtctgtgttttggtgttatatccaacctttcccctatgttgttttctaagagatttatagttttagctcttacacttaggtctttgatccattttgaattaatttttttatatggtataaagtgggggtctaactacattcctttgcatgtggttgtctaatctttcaaacacagtttgttgaagactgttgtttccctattgaatggtgctagtaccctcgtcaaatcgttgaccatatatgtgagagtttatttttgaactctttaatctattgcatttttctgtgtaatggcctttatgccatttccatatttttttttttttttttttgagatggagtcttactctgttgcccaggctggagtgcaatggtgcgatcctctgctcactgcaacctccgcttcccgggctcaaacaattctcctgccacagcctcctgtgtagttgggattacaagtgcccaccaccacacccggctaattttttttttgtatttttagtagagatgaggtttcaccatgctggccaggctggttttgaactcctgacttcaaatgatttgcctgcctcsgcctccaaagtgctgggattacaggtgtgagccaccacgcccagcctccatactgttttgattgctgtagctttgcagtaagttttgaaattaggaagtgagacttccaactttttttttgtttccaagattgttttgattatttagggtccctttagattgtacatgaattttaggattgatatttctatttcttaaaaaaaaaaaaacactattgggattttgttagggattacactgaatctgtagattgcttttagtagtactgacatcttaacaatattaaagcttccaattcatgaacctgggtgtcttttcattattaacgtctttaatttctttcagcaatgttttgtagttttcagcatacaagtattttgcctccttgattttagtttttttctaagcattttatacttttcgatgctattgtaaatgggattgctttcttaatttctttttaaattgttcattgttaatttatagaaatgcaactgatttttgagtgttgattttgtatcatacaactttgctgaatttattagttctagtgggtttgtgtgtttgtgttgggggacggggttggagatctttaggatgttccaagtataagatcaagtataatttcctcctttccaatttgaatgccttttacctcttttccttgcctaattgccttggctaggacttccagtacttctaggacttctagttctagtacttctaatattaggtttggacttctagtactagaagtggtaaaagtacatatccttgtcatgtttctgattttaggggaaaagctttcagtctttcaccatagatatgatgttagttgtgggcttttcatattttgcctttttatgttgaagtagtttctttctatttctggtttggtgtttttactatgaaagaattttgaattttataacatgattatttgtgcatcaatttatgatcatgctgggtggagtggctcttgcctataatcccagcactttgggaggctgaggcgggaggatcacttgaggccagaagttcragaccagcctgggcaacatagtgaggccctgtctctgttaaaaaaaaaaaaaaaaagatcatatggctttttcccttcatcctgttaatgttggtgtataacattgattttcatatgttgaacgacctttgcttcttaggaataaattgcactttgtcatagtgtattatccttttaatatgctgctgcatttggtttggcagtattttgttgaggaattttgcatcaacgttcataaggggtattggttgatagctttcttatggtgtctttgtatggttttggtattaggatagtgctggcctcatagaatgactttggaagcgtttcctcttcgttaatgtttttggtgtttgttgtttaaatgtttggtagaatgctccagtgaagtcatgaagtctgggaattttttttttgccgggagagtttggattattgattcaatctccttactagttattggttaatttaaattttctatttcttcatgatgcagtcttgtaggttttgtgttattggactttgttaatttcatttaggccattcaatatttgggtacacaatttttcatagaactctcttgtttatatgtgtgtgtacatatatatgcatatatacattgtctcaaaaaaattatatctctatatacatatatatgtgtgtgtgtgttgtgtatgtgtatacgtgcgtatgtatgtgtgtgtatatatacacctatgtgtgtgtatatatgtgtatatacacacacatacatacgcacgtatacacatacacaacacacacacacacacacacacacacacacacatatatatatgtatatagagatataattttttttttttttttgagacaaggtcttgctcttgaccaggctggagtgcagtggcgcaaacatggctcactgcaaccttgactkcccagactaagatgattctcccatctcagctgctggagtagctgggactacaggtgcatgccaccatgcctggctaatttttgtattttttatagagacagggtttcaccatgttgcccaggctggtctcgaactcctgtattcaagtgattcacccacattggtttcccaaagtgctgggattacaggcatgagccactgtgcctggcctataatactttttatttttgaagaatcagtagtaatgtccccactttgatttctgattatagtaatttgtctttttttttcttagttaatctagctaaagatttaaattttgttaatgttttccatgaactaacttttggttttatttgtttttctctatttttttggtattatctattttatttatctccactctgatctttatttcccttgttctgctagctttgggtttaattcttcttttactagtcccttaagttttaaagctaggttgttgtttgaaatctttcttattttttaatgtgtttatagccataaaattttcccttcataaggcttttgatgtactytgtaagttttggtgtrttaatttttattcttatctgaggattttctgattcctttgtgatttctttctgtattttagttttcacaatttgtgcattttccagttttcttctaccattgatttctaactccatcctgttgtagttggagaagatacattgtacaatacctatcttttacaatctattgagatttgatttgtgctcacacacaaatgggacattttggaaaaatgtcccaagtgaacttgagaagaatgtgaattctgttgtcgaatatagtgttctgtttatatcttttagatctacttggtttattgtgttctcttttcattttcttttgtgtatattgtcttgctatttttttttgtggttacaatggggattacatttaacattctaaaattataacactctaatttgaatttagaccagcttaacttcaataacaaataaaaattctgttcttatacagctctgtctcaaccctcttttgcaaaattgtatcttttcccattgtctgtctcaaaacagactgatagtgttttaatgctttaatttcttaaatcatgtagaaaataagctaggcatggtggctcatacctgtaattccagcactttgggaggctgatgcgggcgaatcacctgagctcaggagtttgagacgagtctggccgacatggtgaaaccctgtctttactaaaaatacaaaaaattagccaggcgtggtggcacgtgccygtaatccccgctacttgggaggccgaggcaagtgaattgcttgaacctgggaggcaggggttgtagtgagtccagattgtgccactgtactccagcttgggcgacagagggagactctgtctcaaaaataaataaataaaataaaatcacgtggaaaacaaaaagcatagttagaaaccaaaattacagtaagactagcttttacagttgtccatgtacttatctttatcagagatcattatttatttacaggtttgagttctgtctaaggttctttcattttaaccggaaggatttccttcagcatttcttgcagggtaggtccagtaaaaatgaactatctcagtttttgtttacctgagagtattttaatttgcccctcatttttgaaggatcgtttggccacttccagggttcttggttgatgcttttgttgtttcagcactttgaatatatcaacccactgtttctggcttccaaagtttctgatgagaaatctgcttataatattattggggatccctagtaggtgataatctgcttttcaagattctctctttgtctttggcctttgacaatttgattataatgtgccttggtatggatctctcagttttcctacttggagttccttgagcttcttgggtgtttatatcttgggtgttcatatctttcatcaaatttggcaagttttcagctattatttcttcaagtaaccatcttctctttctctctttcttttccttctgggactgtacagtgtgtatatttgtaaatctatgcaagggccccatgagaccaaaagtttctcagagatagttttctttccccacctctttcgaatactttgttctttctttttctctaccttctccctgttttttccccccaccttctgtcggtctcatgctctgctgtaatctgggacaatattgcctgcatgcatttgcttttgagatagagggagtaatggactcagttatggattagctttactctaagagaattagccctttaaattcccagtttattgtggggaatgtctcctataaaactctgtactcttaatgggctttgggcttgacgtatccctctccttgatgccatttagtcgaatgcaagtgtgctagtgttggcaaatgttcacagtgcaataatacctttagtcctcagtttacccaagaatttagcttagtgcttgtaaggttttgaatgcttttaaggtggtattttaaatattttacccaatgtttttaggaatattctgtggataattactctgaataacttagtctgccattatcagaaaacttcaataactttgtcagtgttatgttccagtttgtaatttctcttatcagctggatctaattggctgttaaaatttgtatatcaagttttaaaattttgattattttattgattgattgaagctctatttgttcttcaattcagcctagtcagtttatcatcttgctgcttaatcctgtttttgatgtctttcttttctttctctgagcataaacgtgtgttatattctgtatctgattattccagtatctgagatttttgcaggtcaggttatgctttctgatattcggctggcttttattcttggtagtttatctcttatgtgttttatgaattttccttttaaaactatgagcacatgttgattgaaacatgggagttctttgaggtctgggtaagttaaggccagtttgtttttctggggagtatttgcatttgtgtttggaggccctttgaagcactgttgatcacttttttaccctgggatctcacaggtaataagaattctactcgaggtctatctaaatgcccgcattagtcctgaaatttctagggagatgtttcctctttacatctagaaccaaagctgagatttgcaagttttctggtttaaaaaatgttttatttactttttattattttttggtgcctggtggcttttttctcatttgcccattcactgggaatatcaaccattgagactttctcctttctttgtggataatctccagtgtgttttctcatactgcattgtgcccaagtttcgtctcttacctcctttgcgcagagacctttaaaacgacagttggaggaggcttgcatcaacagatgccctgagggtagtatctgccttcaggactcctttgtttctctgggttkgaccattttcttaattttaaaatcttaatttatttctcttattctcctactatccctgtatacattgaaaagactttttaaacccttaatttaacatactgaaggattttcttctgggaaggctcttcagatatcttatttgacccattgccctaatatttcttaaatgttatatttaatgttttttatttttattttataggattcagtttagctgcatttaaaagaaacaagaggaaactagagctggcagaaagggtggacacagattttatgcaactaaagaaaagaagacaatcaagtgagaaggtcaggtggtgtttgaaatattcaaattaatgtatcagatgatatatcttctgcatttagatacaagctttaggacgatacaattcagtagaaatagaatgtgtgtcacatatgtactttaaagtttttcagtagctacattaaaaatatgttcataatattaggctcataaaagagaaaaagaaagtagaaagaaacaagggaaattaattttaatatattttatttaaaccagtggatctaaaatataactttgaaatatgatcagggaaaaattattaatgagctattttacattatcgtttttagtattaagtcttcagaaccagtttgagttttccmcatctcaattataacactaaatttttattagatatatttgatctgtatttatatttcataaaaatttactgtgaaatagtaaatttacataccaagttattacaggtatacttaaatcttyctaatagtttaatatattagaaaattaaaattttataaaattaaaaattcagctttccatttgtccttgmctcattttaatttctgaatagctacatttggctcgtggctactgttttggttcttacagctcctgatagtgattcttaacatgactgtttagggagtagagtgtaagtataagaaaatatacatattgtattcaggcgtttttagggatagaaagaaattgaaaactacaacattcttgctcagcctgtggcttaggggtttcttagcatacagctcatgatgggtgtcccaggtcacatagtcatgtgatgtaccttagcattcatcaatattctttattgtttagttcttctgtaatggcttagatactgttttgtcctttgtgtcatagttttatatggtttacctatgtatgaatgcacaatacatcatcttttgtagtgatagatattttcttggtgtgttgccacgagataatcagtttggtacaaacctttttaattttctgccggcaaaggataagaatttagaaggcagatgaacaaattaataagtagatcttgatatgatggtggatagtctatttcttgggtttctgcatcggatgtgatgtgtgggtgaatgaatttaggacttttttgcctttttaaaaattcatgataggccaggtgcagtggctcatgcctgtaaatcacagtactttgggaggctgaggtgggtggattactagagctcaggagttgagaccatcatgggcaacaaggaaaaccccatctgtacaaaaatttagctggatatggtggtgcatacctgtactctcagctactcgggaggctgaggtaggagaatcacctgagtctggggtgtcaaggctgcagtgagccgtgatcatgtcactgtgctctagcctgggtgatggagtgagaccctgtctcaaaaaaaaaaaaaaaaaaaaaaaaaaccaaaaacatcgtaataaaatttgcatagagtaaatgatttaatcagtttttataaacatatatgcccatgtaaaccatacacctatcaagatatagaatatttccagttctttcatgctgctttccagttagtctccaacttaaaggcagccactgtcctgatttttattacagtaaatgctttttcttgctctgaacgttatataaatggaatcatacagaatgtactcttttctgtttggcttctttcacagaaagcttttattagacattgtatcaccgatttattcttttttattactgattaatatttcctaatataaatacacattaatttgtttatccgttttcctgttgatggacatttgattttttttccagttttttactattacgaataaagctgctgtgaaattctcataccattctttttgtggagatcaggttaggatttttatatataggagtttcactgcatctcatggagaatatcttcagctggaattactcaagtagttcagttttccattcaggaaatgggactgaactgggtagtaagaaaataatggtgaacaagatggaggaagctcatgctctaatgagaccttacattttaggagaaagagacatattagcatataattaagatagttattcttgtaactgttatgaaggaaaaaaagaagaacaaaatgatgtgatatagagtaacttggatgtgagagtctgaatgaagactttgttaaataggatggtcaacggagacccctatgaggagataacatttgaggtgacatctaaaaaatgagtggcttttatgaagactcagtggaagagtgttccaggcagaatgagctgcatgtgcagaggccctgtgggagtttggcacattacaggaatggagagagagagtcagtgtgccaaatcagtgagcaaggggagaatagtatgagatgaagctggagcagttggtatgggctagctcctttaggacctggtagatcatggcaaggagtttgaattttattcaataattttattcaagaattttatttattttattcttgaattttattcaagaataatggctagccattgaagagtttaaagtagggaaacagtgctttcttattcacattttgcaaagttctccatgggctactatgtgaataatcagtccaagggggaggtaagagtagaagttgggagactagttacaaagtcattgcagtttggagattatggcaccttggactgtaggtgatagggatggagatgacgataagtgaatatatccagaaaatattttgagggtttctggaaagacaatattgatgccaatagttattggcaagaaagagagaggaattaagagttttagctgagcagaggatttaagggttttagctgagcagttggatatttgccatttactaaaagagtagagctggggaaatggggctttctggtggtagaagtaggcagtggaaatcagtaactttcttaacccatctccaacttaatgggctcagattgaccartgctttccattttcaccataaaacctattacttgatgccaatagccccttaaacacccaaagctaatagaataccttttggtgtaccatctgcctctgtttctttcatttgaattatatgccaccaagatcctcattatgcttgctgtgaatcaaggggtaatttcgattttcaagtctttattgcttaagaaagacattttgtaaggctaaggctgccatagatagtgattcctctgatggatctggacaaggtgaattgaaaaccttctggaaaggactcactattctagatgccattgtgtatattcgtgattcatgggagaaagtcaaaatatcaacattcataggcatttggaagaaatggattccaagcctcatggatgactttgagggattcaggacttcagtggaggaagtcgctgtggatgtggtggaagtagcaagagaactagaattagaggtagggcctgaagatgtggcttgaattgctacaatctcatgatagaactttacaggtgaagagttgctgcttgtggataaataaaaaaagtgatttatttagatggaatctactctggatgaagatgctgaaagtatggttgaaatgagaaaggatttataattttttttttttttttttttttttagagggagtcttgatctgttgctcaggctggagtgcagtggcacgatcttggctcactgcaacctccgcctcacaggttcaagcaattctcctgcctcagcctcctgagcagctgagactacaggcgcccgccaccacgcctggctaatttttgtatttttagtagagatggggtttcaccatgttggccaggctggtctsgaactcctgacctcaggtgatccacccaccttggtctcccaaagtgctgggattacaggcrtgagccaccgtgcccagccaggatttaaaatattaggtgagcttattaataaagcaacggcagggtttgagagttgaatccagttttgaaagaagttctgtgggtaaaatgctgtcaagtaacatcatgtactacagagaaatctttggtgaaaggaagggtcattcaatgtgataaacttccttattagtttgttttaagaagttgccacagccatctcatgtatgagcaactgccaccctgattagtcagcagccatcaacattgaggcaaggcccttcaccagccaaaagattatgaattgcttgctgaaggttcagatgagtaacattttttagcaataaattattttaaagttaaggtatgcatatttttttaaacataatgctattatacacttaatagactacagtaaagtgtaaacataacttttatgtgcactcggaaaccaaaatatttatttgactcactttattgtaatatttgctctattgtggtggtctggaacgaaacctgcactatttccaagttatgcctgtaatttaaagtgtgaaaaaaaaactagataaatttgggatttttttattgcattgatttttttttcttttaaagtaatcgattatacaaacattatcacagtacaagtagaaatacaaattaaagccagaagactttattctgcttggtattctacctctataaattagagcgctcttgttttctttagtctttgaccgtttatacttacatttgattagtttaaagtaagaattattaatccatggaatgcttttggctgcaaacaatggaaaacctgactgtggtttaagaaatgcatatttgtccccttgctctctggcccgtagccacatagtaataagtttggaggtggttggttgctggcattagtttaggtttctgatgatgctagggctaacatatctggtattctcttgggcctttttcttatacctttgcctcatggatgtgatatggctcctgaaattttagatgtcacatctrcattcaaagtgagagtaaggcaggatggcaaagagggagaagtgccagatgtattttccttttttatctgggattcaaaatttttctggaatctccctcaataaacttctccttagtagttgagaaggggcacaattcagtcacatggctatttccagctgcaaaggagcctaggaaattgggtgagttgtcataattaccatctcatagttcatggcttgaggatagacacattgtcttcccaaacaaaatagcagttttattgtcaatggtagtggctatttggtaggtcgtttacagtgtatagcattaatggagataagtttttataatctccttccccacaattaacatatcccttgttaatacaaagtaatattgagctaaatagctagtctatacataaattgaataaaagcatattttatctctgcttttaggatgtatagattttaagataaaatactttaaaatgaggaacataaattcttagtaattatccattcttggtaattggcatctttgtttcatccttgcttatttttttgttatttagagggaagacatgatggagaagaaaaagatgactatttagctgtagtattatattgtgaaataaaaatagtagtccttaagttctgttctacttcactctctgggtagacctgtctcttctggatttttcttttatctctttcttatttttatggtatacagacagtccatactttgcatggtagggctggaccataaagtgaccatgcaagctgaaaccatgcagagtgggcttaatggtgtaaatttagcttgttccatgacctttamatatttttgtcaaaacgttaaaaactcttggtggagtacagtgactcacacctgtcatcccagtgctttgggaggccgaggcaagaggatcacttgaggctaggagtttcgagaccagcctggataacatagcaagaccctgtctctctatatgtaaatacaaaagaaaaactggctgggcatggtggcatgcayctgtagtccccgttactcaggatgctgaggtgggaggatagcttgagcccaggagtttgaggttacagtgagccataatcatgctactgcactccagcctgggcaacagagtgagactctgtctccccgactctgtctcaaaaagaggaaagaagaaaaacagaaagaaaaacccagaaatctcttttactgttggttataaatgtgtatggaaacagaaaaaagtaaaaccaatatttacttagtacactaaagcatttagaaacattaacagtgttttatttaggataaaaatttataatttgaacagtacttgcctcctcagcatgtaacttatgatgtcatatgaacatcttttctatgtggtggtgaattttcatactcctttctaattttggatcagctttcaacattctaccttttgctctttcagtgtcaccacatagctgccagtcttcctttagtgtgaaatttttgccaatgtcacttcctctgggacatcttcatcctttttgtcccaactccactccttgataagatcctctttagtaagttcctctgtctgtatatctagagccttaatggcagcagtgtcagacatgcccgtggtcacttatttctcgtataacttcatttatctttcatttgaatttcacttccagcattatcacttttgttttgttttgtttttgtttttccttgactttcttctgtaaattcatcacttagagacagagaggcaacgtttccacctgctgtctttgcacagtgacacatcactgacagactttcaaagaatgtcatgattggtcactgatcgtgatgtgcatcactgatgtttgcagtggtttgtgaaccaaggagatggcgggggagtttatatttcatgcagttactcagagttaataataccatggtaattgaaatttgaaccatgttgtcgagggactggtgtgatttaaataaactctggtaattgaaatttatrtatattaggcaaagcaaggactatttttctgtcaaataacctggactgtttgtcctgtgatgtttccttcaatctgagttttgctcattgtatacacacagtaaagttcagcatgttcctgtatcttccataatttctgcaaatggacatctggatctccccttacaaaattgccatggcctctcattgttggaatacttatcagtaagttcatgtggtgtatgtgatgaagtgattacctgttttaaatttattgtttgctttgttttgacacaagaaaaaagtggttgtattgtttactaatctttatcctatttggaagaggaaaccttacttttggaatgaagtgtttaactcattaactcattggccaattgctgtacttggcttatgctacaggactgactgggttgctacatgactgagagttacttgctaaaagaggagaccctcgtattgggaaaacaaactgattgaatgcatggcataatctagatttcataaatatcagtttcaaacagccagccctggatatgactggaagggactcttagagtattaaaagaggttgggggtattgtttgatctcaacatttttgatgtttcaagccttttttttcctttctcttcatttttcacaagcatattgttgaaatagtttccatctctttttctttaataacagattttacagttgaatgtacataattatttgcctcctcccatgacttttacaaagtaatttaagtttttaattaatttcattggtgtttaggtaaagcagtacttacatgggatagtgaaatgaaagttaatcagacattttccattgtgtgaatgaatatctttccttctttgatttttaataaacaagttaaaaaattttgcaatgattttggtgctttcatacaatgttgtgtgttcaaaaccactctaaagagatgctacaacttttaattttgtattctttagccaccacatagggacatcaaattggccacatgtttcagaaaggaaatgttgggccttgctttgtacccttcatataaatatattctattcttttgaagtatattgtgggtaacatttttcccttttatccaccatcttgaaattattatgtaaatgcttaactgtatcatactaaatcattgtagtttttgggtgagaggtaggctaagatcaaagaaaataaatgcacaaaaaacaacatgttttcctcagattgttccatttgtacttgtctgtgcttgccagaagaggagaccctsacactggaaaaacaaactgagtgaatgcatggcataatctagattccataaatataagtttcaaacagccagccctggatgtgactggaagggactcttagagtattaagagtgcaggaaaaggagtaattagtcttctctagaaattgactttgcatggtctggagttttgtcatattgctcaagaagttgattagtatatgaatatatgagtaaaccaaagtaggaaacttctttgacttatcttttacataaagagattactttatgtattttttaaaaataaaaccgaaaactcattctgtgaaatgattgtctggtatttgaaattttttttttagttgtaggtaatatactgaaaattacatttgcctcacataagactatcttgattactggatgagcctacagattttacatgtaaatcagtagataggtcagtaacttaattaatgtcttattggatcacccccatcccatacatttatttaggttataaagcctgatgattggcatttgttttcagtatatgaggatcttctaaatgtttatagcttatagtactttatgccaatcatcaatatctgagtctaaaactttcgacctttgatgactggacaattgcagtgtctctgtgtgtgtgtgtgtgtgtgtgtgtgtgtgtgtgtgtgtatgtgtatatattccatatttaggaaaagcttctaacttagcatataaagattcaatacctaggagattgagtttcttcccaggtcgtccttaaatccacaccaagctataccttaaatctatatgaagtcttaaagttataagtaagatgaaattgaggcaagaaggcaatgttaagaaatcttaactactgtttttgttttgtaacggaagtaacctgtggtttgtcagaatatttgttataagttgacatcagatattgtcggccttgtaaattcttcctaaattttgagtatttaatagctctgtagagacttaaaatttgtagtatttaacggaatcaatggagagggaaaaaaggaacatttcttaatgttatcattggaatagtcccagctgatcttgtgtataatatcaagtcaccaccttgtagctttcctatcaggaaatatctccagtgaatggaatctcactgggactacagatagaagccttcatatctggaaattggcttagatgctggtgttaagaacatcacattccaagtttaaatatgtctccatgtgatatcatatgctatcaccatacaccaatgacctgatttgccctatcatagacatggtgatgctgacacatgtatagctaataagacagcagaataaatgagtgcattaaaaaaaccaaatgtgtgtgtacacacacacacatacacacacacacacacctattacaagtacaagggtattttaagatcacaagacaagaaataaccagtgcttaattaggttgatggaaaattatctgtaactttttaaagccttggttcagctgtgtcttctctaatcagcttagaatattttaaatacatagtcgggtcccaggaactatttgaaattcaagacttgagactggaattacttgaggagtggagggaatagggtaaggtgagagacagtgtataaagggtcaagagttgtatctagatctattataagccagtccagagactttgggcaaacatggaacctctctagactttagtttcctcagcagttaagtcagcatgttgaactaggtaattaccatggtcttttttagcttggtgtaatactcttaatacatattcattgtcaacatggagtatgtccaaacttccttgattctcttattaaggaattctttattctagtggatcctaaacctggctgatcattagattcatctggggacttttaaaactacagattcttaggttctgctttaaacataccgaatcataatctgcaggaatgggtaagctattgggccggtatttgagatcattgcttgttcttcctaatatgtcacagtgggcttagaaaagcacccattgcataaataaacatggaacattttagatgaactgggattatatgattgaattcagttaatgacttcatgtccagcatcactcatttagttttcctccaggtagtctagaactcccttcttggagttgcagctcttcctctttgcttccaggatttgcctcagggtcactttcattgttcacagtcaaaccttcaccaggcagccagttctctcaagtcaggctccttgctctttatkttcccctgcccagcagaggacctgacacattagcagctatttaatgaaggtttatttgaatggatgaatctatatgtatttttccatttccttttttttatgtcccaacctgttccagttgcctgttttctcctgcctattacacattttcacttgtttgacccatcacagtctaactcagcatgtttagaatcatgctccactcactctcctggatgattgcactagcttcctacctatctgcccacaactgccctgccctttcagtcatttctctgcccagcattcttgaagttttctaaaagtacagtttgattttgtcatgctcctgcttgaacccttaactcacttccagctgctcttaagaataaagtataggctccccaacagagtccccaggaccctatgggagcagacatggctgtctgtctttccaatcttttgccatctcactccgggtcacattgtcaagattcttcctgtgtcaaggtcttcacacctgtgattccagatccagggaatgttgcctgtctccttccttcttctctctctttaagctattgtgctgctccaattgtctctctgtcattattagtgtggttatttgatgtctttatcttccagtagaatgaggttccaggaggacagctattgtatgtcttatttaccatggtttctcagcttgacatataataaatgctcaataaacatttaatgaatacatgcactacttttttttttcttgtttctttttagtagacatactaccagtgagcctttgtcttttcaccctcagtggctggactgttgcagtatcttcatgcctggcttctttgcctctagtcctgctctattccgttttaattctgtgtgctatcagaagatacatttccctaaaaatacctgcattggttttgtctctctcctggaagaaactttaatagaatctttactgtctgtgggttaaaacccaaacttttaagctgaattttataaaccctcttgaaacctagctacaagctacttttccattatcttccttctggaattacctttttttctcaccaaatatatttctcttttcagttttatttgctgagagttctcaaatccaagtttttgttcatattccttcccttaatgggataagcagtaattaataatggaatattaactacttctttgcttcctgaaaattctaattcaactcttcctttatgagctagctccaatgccatgcagatcaaatttctttcttctagttggcacagatgayaggtacttaataagtgttaattgaattgaattatctgctttacacatttgccattttgaggttggtgtatgtggttattttgtttgtgtatgtccatagaagcgtgagcattttgttactttatccttatcacagtctctagaaatagtgcctttactcagttgacattactaatttaagcatctacagctgatgatttgaatattaattttgaaagagaaaacccatataatgatatttcctcttaatagtaaattttgcagtcttccaataggtttaaaatcttttatttaagggcttcaaacatgcattagtctaaaaactaagcttgttttaacaataagcttgtatttggggaaataaaagggataggttatctgaagtattaccaaataatattattatgctcactcaacattatagagatgtaagataatatgtaagtaagggagggaaatgaatgttgaaaaataatagcttgaaacagcccacaatctccactggccattccaaagaggtgagtcaggaagtgcccacaagggggcgtgctcatctagagaaacttgaccaagtgcctttcctgttaatgcaggtaaaactgcctgtttacaaatgaacttctagaccatgtcttccccacaccgccaagaaaaagaatggaccctcatcacaagaattcctatctattttgtagcacatgtttattttggatgtgtgattttccaggggggctaggggacttacagaatggaaatatgaattgccttgtgagctcagacaagtttatgaagcttgtgattgtgcctttttttggctgtgctaagagcatttttattttgtaagcattgttgtcttttctgtgaagaagtgttgaggtttgtaaaatatcctttttggattattagcccaagaaacaggcagtgctctattttcactgcttcatcagtttgtgtagcttgaggaactaccagctagtcatttggagaagtgcatgggctttgattggtgttttttccaccagaagtcatggcttcttgcagtctttaatttttcttttccagtccttttttttttaacytttggcctcaacattatcaccagcaaacatttattgaatgctatttatgtacaggcttttaaatagatcttagagaatgaatagaggatatggcacctagtccctgccctttatgtatttgatccgaaggaattaaacaataaaaagaaatcatgccatttggtatgtgttagaagaacaaaatcatcagtgagagccacaggaattaactggatggagaaatcactctaagctctgctaagtttcacatggcagycttaatggaattggaggaatttaagctggatgttggataaagggtcagacttatatgtctgggtagaaagaaagataaaagtcctgggttcagaggcctgcaaatggatgagtttggttgcaccgtaggttttctgcaggacagtggtttcaaactcagaagccaggggtgccaggcaggtaggcagcctaaatgtgtgagacaggtctagagaggtagacaagtagaagagagtggggctgactggccatgtgtgttccattgtaagatatttwaaaaaaaaatgtgtaacaccaaactacrctttgctggtcaaaccaaacgctggtttttgcagcttgtaattcctggtgggggaatgtcagttgataaagttaaactgtctgcagaatttagcaaagtaaaataggccatagaggaattatgaccatagctagagtccccctgaatatcatgctacttttatttgtattatcgtacttctgaccaaatgaggggaatattttgaaatatgtatgaatggcccatccttgtggctatttgaactaaacacaggctttgggtatttagagtctctgaaaacatcactgagattaatttgaatgacattcgattttctaggatatggcactatcataatttaggttatattttatatcctagaatatacttaactcctttcctactctctcagttctttactttctaataagatctattgaggaacgaaaggataaagagtatataggtactatttctttctttttgcttttcaatatgcttatctttaatcgtcatgtatttatgattttgaataacagtttctatttttgtgggtatattcataattatatggccatttggtgatatgcatagatacgctgtacttaaaaaatctcatgttaaataaggtaacttattactgtattaagtcaacattaaatatttttctacagtctggaaagggttgaatttaaatccaagttaagtggcccatcccaactgttatggtgtttcattgacaggaatagaatccagattgtccatgttaccttccagtcctttatctgttactccccactgctataagactcagtttaaaggctggcagagctctcgtatttaaaagagaaagtgtaattttatccagagaagataaatatgtgccctaaaatgaaagaaagaccagaggtccagaccatagctaggtgtttttggaaagagccaaattggacaactaaattggaaaaggttgcctgcatttataaaggagatttctttgctatttattaataattagcaaggtcttagcttgtctagctttgtatttttaaatctgcccagtaatgaattcatatcctattagtcggtatgttagtagcatgttgtgttgtttctgtctttgaagtattaatactatgatacacatgcctctatgaagtaaaactaccaaatgatcttggttctcttcttctctcttgaatatatttcccagacagtggtgactgattacagtgaaggatgaccagctctccagtgggaaaaacaaagttagagctaaagtgtagtatgggcattgcttgttctcacttttaggaaatcaagaaactttggagtaaaatagaactgaattagtaaaaaatgagaaaagtgtgatccagtaccaaatgacctcataggatgggagggcagtaaagaattttttcaaaaaggaaacactgaatatagcaatatgggaccaatatcaagaaatacaatttttttacagataaagtgagaggcttaatgttcgatggttttagtcttagaagtttgttttgaacaatagactaaagggcacgcaaaacttccagaaataaggattactcccatattacgagaaatgggtgtggattttggtttggttattatggggaccagccaaatatttcacggcagttgttaaaggatgtgcttttgggaacaaactcatttaagagtgatgtgcaaaatggtacattagggaagatctaaatatgaaataatcagaaatgttaggtaatagaaaactgctttagataagctgagtttggatcacatgtccaaattgagcaagatgcagtttcagaaggaacaaagtttgagttattgatgagattcaattaaagaatattaattttatgatactttgttgcttatagatgcatgaggggcaagataagccaataaagatcctgtaacaagccagcctatggtcttcttgtattgtggagaaatgtgtgtattagaggttgaaaggcgcaagggcctcctgtttggtcgggaagtgattcaagaaatctttgtttttgagatggagtctcgctgggtcacccaggctggagtgcagtggcgcaatctcggctcactctagcctccacctccaaggttcaggctattctcttgcctcagccttctgagtagctgggctacaggtgcatgccattgtgcctggctattttttaaaatatttttagtagagatggggtttctccatgttggccagactgatcttgaactcctgacctcaagtaatctgcctgccttggcctcccaaagtgtagggattacaggcgtgagccactgtgcgtggccaagaaatctttttctggaattatttgagcctgcatcacttgaagatatgtagtactttaatgtgtggtgtgggtggggtggggatgagggtaggggtggaaagtgacatttgcactgtatgaagtacaagtgaggcagagatgctagcgtctgttattacttgagagagatgaggctagtgttggaggacaaggctggagggatgggcttttgctgagatttaggtgatacacagagaaagtgattgccaatcagattgaattcattcaagtattttctcacagaaccaactttgccttttttggtctctttatttaaagtttatatctatctccttcattgatttttcattttttctttggtttttttccccctttttctttgtgtttgtcttgttctctttctaatttcttttgttggatagttagcttattaattttttcttcttttctgatgttaaaattttggacataaatttccctcttagtactayttttactgtatcccacaagttttgaaatgctacatttttgtttttcatttttaagtattttttgtttccattttgatttatttgatccataaattatttagaagaatttttaatcttttaatttccaaattttatctacttttattgactcctaagttaattgtattatagtcagagagtatattgtttgatattgttttttgaaatttgttaatgatttagtttatggtttaacgtgtgatcagtttgtgcctgaaaagaaactttcttttctaaaattgggtacagagatctgtcagtgctataaaatcaagctttttaatatgctattcacgtccatttcttactgatttttcttgcttgacctcttcataattgagagaaacatgttgaaatacctcattgtggagtatgatttgttgatttctctgtttttactttacataaatttgaggcttttaaaaatacatacaaatttagaaatattgtatttccttggtgactctaagctttcagcatttatcatgtaaagccctgtatctctattaatgctttctgtcttaacacttattttgtgtgatgttaacatagtttcattgtttggattgatatctgcttggtgtatcgttttttcttccccatccttttactttcaacttttccatatacttatgctttaggcttatctctcataaataacatctagccagattttaaaatccaatctgatgacattcaataagacattattattttttaagtttttttttttttttttggagacggagtcttgctctgtcgcccaggctggagggcagtggcacaatctcagctcactgcaacctctgtttcccgggttcaagcaattctcctgcctcagcctcccgagtagctgggactatgggcacacaccgccatgcctggctcatgttttgtatttttagtagagacagggtttcactgtgtgttttaatttatatgcaggtttgccgttgtgtttgcttacccatttcttgttgcgtgtctgcttgtcctccttcatttatttcccttcttcatgaaatatatcatttatttatttattcatccattcaacaagtgtttactgagtgcctaagaggtgtcaagggcttttctgggtgcttggcatatgttagtgtataaaacatgcaaaggttcctgccttcatgaagcctatcatcttgtcagagagatgggcaatgtaaatgatatgagcattctatcattttagaaggtgatgagatgttatggaaaaaatataaagtagagcaaagaacgggagattaggtgtgcttgtgtgtggatggtagggaggatgcagaaggaggacaggttgtagtgttaagtagaatgccccttacggactttattaaatgcagtcctcctggcagtgaactcattggatttatttatatattgataaatgtctttaattttgttcctaaaaggcagttttgttgaataccatttgtaagtttatagttgcttttctttgaggatattataccaaccaattatagccttctggcctactgagcttccaggaatttggctgtcattctgttgtaggtgacatctcttttctatctggctttttccctttttctctggcttcctggagatcaggattcttgttttctatcagtgctggaaaatttgagccattttgtctttaaatattttctctcttttattttgtctattctctatagttaaccacagattagactttgagccatgtctcttaatatctcattcatatttttcaggttttcccttttttcttatagttacaaccaaatgtgtattaaatatgccttatgccaataggaaaaagttgaaaaatttgttcatgatctgatgttttgaatgtttggttttgttttttaagatagtacattgctattgatttttttttgccttttttacaggtaaaatttacacacagtaaaatgcatgcatcttgagtgtataattcgatgaattttaacatgtgtatataaccatgtaaccaatactcctatcaaaatatagaatatttccatgactccagaaagttttcttgtgccccttcataggtggtgtcctccccaatgaagataacaattttctgattctttttcaccatagttttacttgttcgttaaaatggagtctatatgttcttttgtgtccagcttcttttgctcagcatatgtctgaaagattattcatattgttacatatagcatgggctcctttttattgctcagcaatcttccagtattgacaatatcatgattcgtttacccattcccctgttgatagacatttggattgttcccaggttttggctattgcaaataaaggtgccatgaacacccttgacaagtctttttgtggtatacattttgatttctctttggtaaatacttaagaatttcattgttgggtcataggtaggtttatatttaatgtagaacttataaattttgatttagaattataaaattgtgattaatattcatttcagacaaataagtcaaattggacatacttatcattaaatatttaatatttgaagtccttgagatgtgttctgtaagtattttgataggatgaatgcagtttaatgacctacttaatgtcatcttaaggaacttgctgtaatttttatttcaagttcagcatatcccaggttctcaatctttaaccagtggttcactatgggtataagttaaatgatattaattaaactgcgtatgagtgagaatagaaatgatttaaagctgcataaaactacttttgtgatagtatttactgtttagctgtgtaataatttaagccatgagtaktcgtgtgatctctaccatcacttacacacactcattcaacatgcactctgaggcccttcaaactgttccattttaaagagaaaagcttccaattcattatttaaaagattatcttaaaaaccaagatgaaaactgttgccttttccacctttaatgttgcaaaccccagaacattgtataggaattctaccagttagaaaacatcgtcctttgctatctttgagggtttggaatttttaagtaatcttttttatggtatgaatttaattcctctaacccagatatgttaaatccccttaaaagcatggttcaaacacgttatttttattttaacctgaaaatgcttctgttaatttttgtcaagtgatttaggaaataaatagtataaagattttattgtttatttttttgcttgtttagagatagtgtcttactctgttgtcctgactggagtgcagtggtgtgacgattgctcactatagccttgcactcctgggcacaggggatcttccagcctcagcctcctgagtagctcagactacaggtgtgtgccaccatgcctggctgggttttttattttttgtagaggcagggtctgctatgttgaccactctgtttagatttttatatggtatacatttttttcctcttgctctataaatatatttggtaccaatttgtatagtgttgcaaagccatttaattcatacctattaaacaaagaaaataaaagattacttaagaatagacatcttgactatagtttataagaaacatcattaatagtattgggcatcagaagatgattttctaaagagggaagataatatcattgagtgttcctatgttcagatttttgctggtttcatgcagtccacataggtgagagtagataattctagctaaattattattatttttgagacagagtctcactgtgtcacccaggctggagtgcagtggcktgatctcggctcactgcaacctccacctcctgggttcaagcgattctcccatcccagcctctgagtagctgggactacaggtgcacaccaccatgcctagctaatttttttttttgtatttgtagtagagacagggtttcaccatgttggccaggctagtcttgaactcctggcctcaggagatccacccaccttggcgtcccaaagtgctgggattacaggcgtgagccacccagcccggcctagctagattatactttgtttacacatagttgataaactgtagcccacagtggccctgctgttggatggctgatttgtgagagatatagagctaggtctagatgtcctgtagctggagccatctctctgtgtttaggatactcagagatgtgaaagctttatgatggcattattgtactgtcatgttagggtataagtcatctgcatttctcaagtggaagctcatgccagttataatgctgctctcaaacctgacagaggtatacgaggagggcttggtatgttttcaaagaatgcatttgtgtctttatcattatattaagataatcccataatagacctattttagaatgcacttatacatttaagatatattcttattttttagctacttgatatttgagtaagtctggacagaagaaagactgagttaataagataaaagactggtagatggggctgggcctggtggctcatgcctgtaatcccagcactttgggaggccaaggcaggtggatagcctgaggtcaggagttcaagaccagcctggctaacatagtgaaactgtgtctatactaaaaatacaaaaaaattagctgggtgtggtggtgggtgcctttaatccccctactcgggaagctgaggcaggagaatcgctcaaacctgggaggtggaggttgctgtgagccaagatcatgccattgcactccagcctgggcaacaagagygaaattcygtctcaaaaaaaaaaaaaaaaagactgatagatggtgtctcttggcagatttcagagagtgcagattagaagcttaattttctggtgggaagtgccttaactttgtatgaagggatttattcattttaaagtagtttacatctgttactttaattcttataataactatataataaccatctctaatttggaacagagaaaacagggactgcttatttattggttacttcaagaaagttttatttcagtgttttctttaacacatgtaacctctatgctaactttatatacatgcttattttgaagaggactatagttttatacagttgctttttagttacaattttatcaaaaaagtaatacaaatagcatgttttagtcaaggacaataggtatatgtgtatctgtgtagtgcatatattttttaagtatttatagagtgtaagagtgtaatagtagctctatatagtaacagtcattgtatgttttttaacctttctaagatttcattcctgtacaaacgagctctgtgaaattattatggccaaaataccaatgtttgtctttcacctaatttatctgcacttcataaaaatgcttaaatattacttcatcatccttaaatttgctttgcagtatgtgaagcctatgaactaattcttgaatatttatgaagtaattctgattttttttaggtgttacaggctcttaggaatatttagcttaatttggaacaggattctttattatttgcatgacttttcagttttgaaaacgaagttacagtaaatccatgtatgtataatccagttatactgacatcagtttttgtatctttctacaggagtttggttaggtataacagttctcatggttcacaatatcctgattgaaatgctaggaaaattactttacagataatgcatagcattgtgtatacgttacttattccctctataaaattctgttttacagaatgcatgggtagtatcagcagttggagtttataaaaaagagctaatgaaaaatacccttaagagagtagattgtaagcattctcgccagaaataaatgattatgtgaggtaatgtatatgttaattagcttgatttctgccattctacaatctatgcctatatcaaaacatcatgctatataccataaatatatataatatttattaattaaaataactgaaatgtaaaaaagagacataaccctccctcaaaggttagacagtgaaataggatgaaagtcacaatttgattatttaccagaagcaatcatccttatctggtaggactgatgaagacagtcactttacattatgccttacttgggctagggaaaaaagtgtgtaaaaatttccagaattttatagcaaagaataagggcaaaaagtactggcatatgtctgtcaataaaaactcagtatttccaaaaataatcttaaaagaataccctttcttgacttctctgttgttattgttgaggaaagttattttacagtttgtttatttgtgtgagatttgtttgctattcaaagtgtaagatcagtattttaaaatatagataccaaatccatgtagtataatagtggtgatatgctgtcagttgacagttgagcaagatagaacttaaatcttttatactggcataatgttagccttaggtagtttaagtttctccttcagcagatttgtgcctataaatagtttgcttcagaatgaatggggcaggtatttggtggataatggtcccctggggtgggatgctgttagaccatcagcatagtgtggaatattgttagatatacagtcttggatagttcccagattgctccatcagaatctgcatttaaacaaattctcctgatgatgtgtgtgcacattaaaatttgagaagccttcttaaaggtgacatcaaacttggcatctggggaactaacacttctctacccragattgcaaagatataaaattatttattagcattataaaacaaatattcctcttaaaagtatatttctctttaagattatccatcttttctggaataaaatgtttttaatgcatttccgtactgctgttcttaatcttacctaccagagaagacagactttgctttgtccaacctgaatgagcaagtctggttattgttaagtcttccctaagatagcggcagcatctggatttgcgtgaagtcaaatcttgcgaaacagaggtagaaaactggccctgacattgggatggcattgcatgttactcactattgggcatgttttgtaccaccagggatacagacatcctgcatcctaattaaaaaataaatatgtcctgagtgtctgttgcattcagtgtgatgtggagtggatcaaacctttccttagggagttcaggccaggaagtattcttgaagggcacatgccttgagcagaactatgtcattctgagatatgaccatgtggatccattggctagactttccctagctgtggttaaaagagggattaggaatatagcattcatttcagccagttcagcatttcctatcaaactaagtactgtcatagtgtatcagtatatttaagggaagttagaatttagagcaagaaatataaattctagatgtaagtaccttttcctaacagacttgatgtaaaattttgttgtggcacactctacttctgagttttccagtttgctttagggaaacatctcttgtttgaattctgcttccactatttagaaactcttcaatgttgctaaacttctgagatgggcccgggagctcattgacttttctggtgatggctttagtgtgtcattttgcttcttagggatctctcagtaccaaccaagtcctgctcagtaatgtgagcaataaatcacacaggatgaggagctgttcatgttgaacccggcgttgggcctggctcttacatgcatactggtggtgggggtaagggtggggtctagggttgtagggcaaggtttgaaaaccaatgccctagcataagaacaccaccatgactactattaacctaaaaacctaccgtaacccccctttttaatatatgagacttctttttccatgaatttttttcttgcctcccttaatcattgtttctatccagtagtgtagtgtttgtctctcttgcacaggtgacccataaactttggaggtaggagacagcggctcatagtcagtaaatatcactatgtgccttaaacatgtgggacctgggacaaaacattgaaacacaaaccttccaagaacgtacacttttctgccatacaattggcaagcatgttactgttataggagagaagggagcttgccataaattttctcacaaacaaggaactctaagagaaaaatgatagtgtggtatactttaagattgtaaatgccattttcttaatttattgtgtggaatgtatttctattagatgtttgtatataatacttaaagaaataccaacaagagtatttattattagctcatttatgccaccgatggtttcctctacacattctcaaacatgaacttaattcttgagaatgaagagatactgctgtatactgtaatttatattaaattgtgacatttcctccattaaaaagacactatagccttattattagagaaaagcaacaggataccttttgtttgggatttctcggtggaaaatacattttgacttaaataggatttaaatggcaacttgataatagataattttaggagattgctcaatgttccacttagggattagtttagattttgttctgtcatgattgtatggaaaagtgctatgtagtcatatcagattgtcccactccatgcctagtgaatacttgtgccacttttgctctgcaggaaaatgactcaggcactttggacacggtaggcgctgtggttgtggaccacgaagggaatgttgctgctgctgtctccagtggaggcttggccttgaaacatccggggagagttgggcaggtaagtaattatgggttttttaaactagcctttcaaagtaaagcatggaatttttagctcacaatkttttaaccagtgggaacattttttctttagaaaaaatgaatgtcattgttttttaacatgtagtataaatcatcaaccaaatacctttttaaaattctttttaagaaaacctatctcatagtaattggtttgtttctcatcttyacaatcgttgatcctagtttttctsctttcagcaggctgggcactggcctgggtatttagtagacatttaataaatgtgtgccagtttccattttctctctgtaaatgtcactctctttaggaacaagctctacttgactatactgcttgctttttagttggagaaatgattttagagttacattttttatttcctctgttccatgtattgtgacatttggccctttacatccctcctctgatccagcatttcagccattttagaaaataaccagtatttcaggtcaccaacacatgatwccacttaacaaatctagaaatggagatggtctaatttatgtaaaatttgcttgtccccagttcacttgcacatcttcttcactttgcccctttcccccgtctctcatttttagttttatactgagaatgaaatttaacaatctatttgatctaggaagctttctgaggataaatcaattttggcacattacttgtgggcttaataaatgtttgttgagtgaacagatgaattggatattctcacggagtagttgcaagggttcatttaaactcagtatttgggtggcatcttatagatggaatgtgtcttgttatgctttgtgtactttgtcacatttgaagaagagtcagtgtcacagttacttttttcatgatggttagtgactatttgaagcagagagatccaattcatggagaatatcactgcacaccccaaagtggtgttgyttgatctgctctaagctgcttacattcctagactaggaaaaaggggaagggaagaataactagttttgtgctactctgcctagtgtgcaaggsgctgtatagggaatgattactcaacgtatgtacaatgctttaactcattgtaaaagcctttgtctggtcatggtatttttctacattataaagtcctgtgtatttgtcaagtttgcaataggaaagtcaagcttggcatatcagatttggatacgctagtagagaaggtgagagaaaagccagcagagtcacctttgatgcattatagtccccatgactttctcactgttttctgtttgttttggttagcaaaatggcaacaacagaactaaggatagttctggactatgttagcaggatattacgtctaacaatctagaagctattctgccactgcacttagaactgtcctgagcaaaagaaatacttccgtaaaatttatgtgttggtttgcctcacttggctagtttgtgaatacacagcttctgagagttagaaaatcaggaaagagtgtggaagaaaggagtaaaagggcttatatgaaaatgcagttgcttaattggattataatgcttggatagaggagatgtaataaacttgaaactatgtaagtatcagatgagaggtaaagaacagttctttttgacaagcccaaatgaaacaaaatacaaaagcaagttatatcaaaggctaattattttttaaagtgtgctgaaactagatacttttaatgtattttaaatgcacaattaactacttaaaaattttagcatattaccctgctgtagatatgtgatagcagtgcagatggtgaatggtaatttgaggccaggcgcagtggctcactcctgtaatcccagcatggaaggccaaggtgggcagatcagttgaggtcaggagttcaagaccagccgggccaacatggtaaaaccccatagagaagtagagaaggtgagagaagccagcagagtcaccttcaatgcattatagtccccatgactttctcactgttttctgtaatcccagcactttggctcacgccatctctactaacaatacaaaaattaagccaggtgcagtggctcacgcctgtaattcccagcactttgggaggccaatgcaggtagatcagttgaagtcaggagttcaagaccagcttggccaacatggtgacacccatctctactaaaaatacaaaaaatagctgggcgtggtggtataagcctgtaatcccagccagttgggggggataaggcaagagaatcgcttgaacctgggaggcagaggttgcagtgagctgagatctcgctactgcactccagcgtgggtgagagtgagactctgtgtcaaaacaaaacaaaacagaacaaaaattatctgagcatgatggctgacacctgtaatcccagctacttggggagactgaggcaggagaattgcttgaacctgagaggctgaggttgcagtgagccaaacatgccactgcactccagcctgggagacagagcaagattctgtctcaaaaaaaagaaaaaaaaaaaaaaaggataagaaatggcaatttgaattagaacttatttgcttctttagcttactgtaataatttgaatttacagtttggacatgagaaaggaattattatatttcatttgtcctcctaaacctcaccccacccccacacaaataggcggttgagtttactggttaagtgtggacttccgatctaggtaaacctctattctaatcccacctccccatttaccatgccccttactttgaacaagttacttaacatctttcagctccactttccacctctgtaaaatggggataacyggctaccttacaaacttgtagaagattcaatgtcaaaatgtatttaaattacatattatagcccctagtaataacagctatagctactgttaattaagcacttgctatgttcagcaagtacgttaattcgcatgatcctgtgacaacaatatgaggtaggtattttcattatctttattgtatagaagaggaaactattgcccagagaagactaataataatatcatttatatgacctacttttactgcatgataatagctttaataaaattttaatacagttttactaccaaaaagaagtaagattttaaaaatttgtttttaaaggcttgcttaaggttgccatattttatccaatgaagtggataagagatggacaacctctaattcttttatcttacctatcactgtctcagcccaatgaatttcagaaggttaagaagaaagacaattttaggtcttgaaactaaggaagggtatcataaagggaattttcttaaagggaaggagcaaagggtaagtgtaaatgttcttttctagaaagatgacctcccctggctttataagaggtgtccttgggaccttatttactattttttgagtgcaggctactggtcatgttaattgtgggggacgtaaaagatgatagttttcaatgaagaaagaatgggtccttccattgatttcttgtgttctctgagactggctgacccagcacttgcttcagggagtaccagttgaatagttatcccacaagtctgccagtttatttataaattcatattctaaatcacttctgaagggctttcagttgccacactgaccctgagccagcatgtattttagaagcgtggtgttgtcagaaacagtaaacagatttcccaatgtctaccatattgagagtatcccgctcagttcttgcttctaattttaagagggatattgtctgtaacatctggagatagcaactatgggtcacatgaacatgggagacttccgtctctggttatcctggacactgacttatttctctaggagggtaattatgagagagtggtgggtttgtgcatcgcagagtcttggggaacagctcacaaatttgggtttctttgggttagaaaagagaactaaaatagctgtttttaaaaaattggaggactttctgggggaggttacagtacttccagagagcagaggcaggactagtggttggaggttataatacagcacatatttgctaccaatgggaagtgtccgtaaacagaatgtgttcccacatgaggcagtgaggttctcagtgtcagaagtgcctgggatgtttcatggagattcccgctctgggtagaatattggagcgaatgatttctaagatccttgtaaaaaaataacagaatatcatagaaagctgaagtctggtccccatcctcagtcttagcctattccccagtcctcagaatgaactcttagaaaatatcagtactgctttatgggagtatctttttcctccatcagtggcagggaatactgaatgtattgtagcttgctattgttttcaattcaacaatatgtttgggagctctttctgtatttgttcttaaagactttttaaaaagcttaattcttttatttttaacctttgcaatgaattccacataatgccatgccaaagtttagccatttcctcactgattgacatttaggttgtttcaagtttctcattcttatcaaccatttagtaatgaactcttgagcatgccaccttgtattttgctatgatagctagctagctaggttttttaaaaattttaatctctacttcttactatggagtggaagagttattagttgtgatttccctcccaaagtcagaaaagtcattgtggatattgaagagaagtagcattattaaaaacaaaataggaatgattgtcataatctgttataaaaccatagtagcttattgtgtacctgatggtttcagatgtataaatctgctccaccacctaacaaagtgatgagcttgagtaggcctttttgcctcctttcttttcatctggctgaatctagcacagtagtgagcatatattgggccctttggtacagaactatttgcacttcctcttgtgccacgtcaacacagacatggaaaaggccctcttgaagcagggtttcctggagcatggcaggaggaccagctgcatcccagtaccccatggccctggttaacagtactgattcctaggtctgccccagacactaagtcagaatttccaggaatcagggttcttatcagtaagctccccaagtgatctgacacacacctagtttgaaaactactattttaagccaaccacattggttttaaggggccagaagaacaactagctgacaaattacaaaagggagaagtttttcagggaaggaaaaaattactgctgatgacactaagaaacttgcttttgctattttctgaaagttttaagattaatggaatatctgaaaacatagttttgatagtattaaaagcatcgtgtgsgtatgtcttatacaacatctggtattatcacctagttgttttayatcattattaaaccaggctttattagagggtatgatttctgttgaaaactaataattacatatgatatttctgaaatattatatctattttcttttttccccaggctgctctttatggatgtggctgctgggctgaaaatactggagctcataacccctactccacagctgtgagtacctcaggtatttgctgctttcataaccatttctcataacttcaaccttgtcaatcatttaatgattaaaagcaatatttgtgrgtaaacatagaacatgtgctatgacagtgtatggatgtgggaaagatcttcagtatttgcgaggttttaagggttgtttagtatcagtgtaaatactttgctaacattttctttttttttttttttttttttttttgagtcagagtctcactctgtccccatgctggagcagtggtgcgatcttggctcactgcaayttctgcctcccaggttcaagtgattctcatgcttcagccttccgagtagctgggattacaggcgtgcaccaccacacccggctgattttttgtatttttagtagagacagggttttgccatgttggccaggctggtcttgaactcttggcctcaagtgatctgccctcctaggcctcccaaagtgctgggattacaggcttaagtcactgcacccgacccactaacattttcaatacaactctggagttaactatggttaattatatttttatagatctatattttttctaatgacccatgatgctgccaagtttagataacaaaagacataaaagtagcagttaatttcaaaaattaacagataatctcttgagtaaaatgttgacataaaacttacaaggtacatttccaaatatacagtttatgacattcagtccttgaacgacacttttaatgtaatacaggtcttctttttatatgtatattgtaaaggcattatcatttagtacaaagtgtgtgtgtgcgtatgtgtgtgtgcgtgcgtgcgtgtgtgcaggagatgaggaatggtggacatggagagttttaataggcagaatggttgttgtctatttccatactttaatcatgcctgtgccagatgtacgtgaagccttttctcattatgtgatgatacctctggttgacaaaataatattgattcattcctttttcatgttatccttcaagttacagtcccatccctttctctccaacagcatcagactttatcgggagagtggacaaatatggcttcctttcctacctttctctctccaatttcttatcacattggtttctgccccaccacactaacaaagcacccagtccagtagccctcttgtcctgctttctgtctgctctttctgcgatctctgatgcaagtgacttttycttttgcatgtagcatagatcctggaaccctcttggtttgtctgcctctctgacctgttccatcttggccttcttcatagattcttactcctctgtcctcccattgcccacagccccagggttgagcctttggtgaattctgtgctttctcctgctgatttcttgttatttctgctgttctcatgatttcagctgttctctcttgggattggcttccatgtctgtatctactttggacttttgaggtgcatgtgagtcctttctgacttcctggtgggcatgttcctatgggtgctgtgtatacatatcagactcatgaggttcaacagaacatttcattcttcatccccaccctgtgtcacctttctcctgtgtcctctatctctttcattgctcttattctcctatcctttgctcagacttgaaatcttggcaccactctcatatttgtggtttctttctgtttcttctttcctgactctgttctttcagactcatcttctcatgcctgcctatcttagcagcctcctgacctagctccatttcttgcatcagtggaaaaacatggttttgagccattggcctatcaggagaagtctaaaatgaattaatgttgaatcgaatccatactactataattgtcaaaaaattgtttttagtcatttttgaagaaatgagcataatgtaataatatgagttaattttaaattttaatttaatattggtggcacatgaaaaccttgatgcataatgtttacaaattaggctgtgaacataatttagtatggccccgtgtctatggaaaattgtagtayttgaacaaagcaaagactaattcatagttgcattttgattgtctcaaagaaatcacagttggaatcatgtattataagagttttctttgtggtcaatatgttgttcagtgagataggttgttgtttagacattactttcatatctagatgttaggagaattggcttctattctaaactgaaatcctgagagcctgcctgattgtgtcartttggaaaagagatttccaagtccgaggagattgtccaccagtcccctacccttattttaaaattggtgatgtgcaagttggaataagaacatactccatggatttgattctattaagtagaatgcaaggaatgggtaggtaaagttaaaattgtaaaattaaggtttttctccattgcttttgaatatttcctcttttgcctatcctgtgtcagttgaagatagtttcatatgtctaaagatacctctagctttccagttcatgacatccagtgtagctttttaacttagatacccaacttgtcatgttatactcttcgcaagctaaaagactaaccatcatcagcccacagaacctggggatgatagagtaaatctccagtccctcttgtccgttggactttgtgtgattgcctcattcttgtttctcatggggctgttgctatgaagttgacaatggaaacacatggcagagttgggtgatcaagtcagaagaaaggtggagcactgaattttgcaactgtttggccaaaataaagaagacttgtgccttaggctgctgcagaaaatccagagacctggcctgcattttaggattatatatcttagaaggtgataattgaaaggcggagaaaagatagttagttatggttaggatagggctctcccaaggccagatgggtgatttggtcattagcctgagggataaactctagcatcttgttctcatcactgggtgaggagaaatgagtaagggcttggggagagggggtggattaacaggagctgacctttcaaactctgactaatgttctggcgtcataggaatttgcctagctagggatagactagagcaggcacatgagttcctgtccagactcttccagacccactagctgtggagcctgggcaaggggttatttgtaaaaccagaataatatctaccattactgtaaggggtaagtaagttgacatacacaaagcttttagtgcatttcttgtcccagagtaggggctcaatacttactgtatttcattgaatctaagtcatcatcctttatcagatgcaccattatttttataccactaaggaaacaaaagactgtcaattaaagtataacacactgccttctcatcacttaatgcatggtggttgctttacaggaaaatatagaattagggatgtctcatcagtgagaagtatttccttcactgatagcaaagtcatgcctcattgccatttccatacctttctatgtgtacagttatttttaatttgaattctgtatcacaccgtaatccttctgaacacattttaaacaacagtttaactcaacacatgtagttccaacacggcacgtaactgaagggtcaacacatgcgaaccgcttgcatctagaggcagtggcagctctgtcactactgccaccaggcatgtaatgcctggaggattacatgggaggatgcatcagttataacacacctgaatccagaagtttaaaaatgtgaaaaaagtatattttagaattgataaattatagtaaaagcttttcttattctcagctttttctagaaaataaataatttgtttcagactgtcttgaggcagtaagataaactcttgaggaaagagggctgtgggtatatttgtgtctcctgagtgcctggcaaacagccttgtacagggtaagtgcccggtatacaaataaaaattaagaaatgtatgtgtgggtcctccctgtttgagaagaatgcttactttttcaaacagattattcaccatggactttctttaaataggattttaaaatataattcaatttgccacatttgaattcacacataatttttcagtaacacagcaaatacataatgttagaaatatctgggatatgtctctggctatggaaaggacgagcagattgaagattagaagatcagaaggaggggaaaaaagcaagagattaagtttatgctttggtttaccttaacattgcttttccgttacttgtctatacagttcttttttctttcctttaaaaaaaaaaaagacaaagtctcactctgtcgcctaggctggagtgaatgcagtggtgtgatcatggctcattgcaaccttggactcctgggctcaagtgatcctcctgcctcagcctcccaagtaggtaggactacaggtgcacaccatcacacctggataatttttaatttttttgtagagacaggatcttgctgtgttgcccgggctggtcttgaactcctgggctccagtgatcctcccactttggcctcaaaaagtgctggaaacagtgagtacaggggtactgatggcaattgactaagatcagaagatgtaggcttcatttcccctccttaaagtattctggcatgaagaaagacctactaccttgtttctgctgtgaggccaaaggatttctgattttctcagttctttgctttttaaggtcttggctctgggcatttctagaaacctgaggacggagagggttgtggtcaggacttgccaggagtagcttcaaaggtagatgggattaaaaaaataccaaaattgagaacagccttatgcctcaatatttctgagctagtgattagtttcttcctcaagggctaggagaatatgccattcctttttgatttctcaacttaacaaccagaggtcttcctctgtccctctgtgggagattgtctatgggactgtgttagaaaactcgtgcccagagacctttgtcaggagggcacgagacagccttctctgtgagaggggggttatgtgacagcaggagccaatgggagactactgctgagatattgacaaatgccatgtggtcattgctctttaagggtatgtggaaggcaggcaggaatccatgcttcagcttctatttagcagcagtcattcttgtactctgtgtgtcacaggcactcttggtgaatacaagccctattctactgaggactcagtgcaaatcacctagggttccagtcttccttctagccctctccccatttcttagcaacccttcaaggtgaaacctcaaggaattttctatactcaaggtttattatttttcttagttctcttctctcactcaattttattctacttcagtcaggacttctcctctaccacgccaccaatctgttcttgtcaagattaacaattacctctaaagtcatgtgattatcctttagtcctataagcaacatttgacacggttgctcaaataacttgctcctcctgtaaatactgtccttaatagacttccagggaccacacactcctgtttttcctgccacctcactggctgctccttcttagtctcctttgttaatattcctcatctctttgacgtctcagtgttggagtgcctcagtgcttagtccttgaacctcttctctctttctttgtatacctgctccctttgtgtctcatccagtctgatggctaagtaccatctatgtgctgatgattcctacaattttatctccaacctgggcctctctccataactgagttataattcaagtgcttgttaaaatctccacttgtatatataacagacatctatttagcatgtccgaatatgagctcttgcctaaccctaaacgtgttctcttgaaatattttccccacagcaagtgtcaattccagtggctcaagtcaaaattttgrgttcatccttgaccctcttttctatctcacgcacatccaattcaccaacaaactttgtttactctcctctctgaatatatttaaaatctgaccacttctcagcacgttaatggccaccaacagttctgtggtgccatcatctctaatctggatcattgctagcctcctagctggtctmttgctttttgccccattccccctttatttgttttgcaaccctgcaactggtgttcaaaccgaactcaaacgatatacctctattttgaaatgttaagccacttcccatcttaataaatgggaaagccacagtcctaatgaagggcctataaggccttgttggagatacttcccagcttcccctcagaacctcttgcttttcttctcttgctcacacaattccagctacggtggctcctttgcagtacttcacacatgccacgcacactcccgccataggggctttgtcaagctgctgcttctcctccaccctcagtgtctcaagcccccactctcacctcatcagacctttattcaaatgagtcaccttgatgagttcttctgcagccatcctatataaacatggagttcttccttcagccaacatttcctgtctccctttcatgttttattttttcccgtagcaagtatcattatctaatattttatatctttacacaattttctttttaaaaaattggtttaatttaatttaatttaattttattattatactttaagttttagggtacatgtgcacaacgtgcagattagttacatatgtatacatgtgccatgttggtgtgctgcacccattaactcgtcatttaacattaggtatatctcctaatgctatccctcccccctcccccaccccacaacaagccccggtgtgtgatgttccccttcctgtgtccatgtgttctcattgttcaattcccacctatgagtgagaacatgcggtgtttggttttttgtccttgcgatagtttgctgagaatgatggaatgatggtttccagcttcatccatgtccctaaaaaggacatgaactcatccttttttatggctgcatagtattccatggtgtatatgtgccacattttcttaatccagtctatcattgttggacatttgggttggttccaagtctttgctattgtgaatagtgccacagtaaacatacgtgtgcatgtgtctttatagcagcatgatttctaatcctttgggtatatacccagtaatgggattgctgggtcaaatggtatttctagttctagatccctgaggaatcgccacactgtcttccacaatggttgaactagtttacagtcccaccaacagtgtaaaagtgttcctatttctccacatcctctccagcatctgttgtttcctgactttttaatgatcaccattctaactggtgtgagatggtatctcattgtggttttgatacgtatttctctgatggccagtgatgatgagcattttttcatgtgtcttttggttgcataaatgtcttcttttgagaagtgtctgttcatcttctttgcccactttttgatggggttgtttgtttttttcttgtaaatttgttgsagttcattgtagattctggatattagccctttgtcagatgagtagattgcaaaaattttctcccattctataggttgcctgttcactctgatagtagtttcttttgctgtgcagaagctctttagtttaattagatcccatttgtcaattttggcttttgttgccattgcttttggtgttttagacatgaagtccttgcccttgcctatgtcctgaatggtattgcctaggttttcttatatggtttttatggtttcaggtctaacakttaagtctttgatccatcttgaattaatttttgtataaggtgtaaggaagggatccagtttcagccttctacatacggctagccagttttcccagcaccatttattaaatagggaatcgtttccccatttcttgtttttgtcaggtttgtcaaagaccagatggttgtagatatgtggcattgtttctgagggctctgttctgttccattggtctatatctctgttttggtaccagtaccgtgctgttttggttactgtagtcttataatatagtttgaagtcaggtagcgagatgcctccagctttgttcttttggcttaggattgacttggcaatgtgggctcttttttggtttcatatgaactttaaagtagttttttccaattctgtgaagaaagtcattggtagcttgatggggatggcattgaatctataaattaccttggacagtatggccattttcccgatattgattcttcctacccatgagcatggaatgttctttcatttgtttgtatcctgttttatttcattgagcagtggtttgtagttctccttgaagaggtccttcacttcccttgtaagttggattcctagctattttattctctttgaagcaattgtgaatgggagttcactcatgatttggctctctgtttgtctgttattggtgtataagaatgcttgtgatttttgcacattgattttgtatcctgagactttgctgaagttgcctaccagcttaaggagattttgggctgagacaatgaggttttctagatatacaatcatgtcatctgcaaacagggacaatttgacttccttttttcataattgaatatcctttatttccttctcctgcctgattgccctggccagaacttccaacactatgttaaataggagtggtgagagagggcatccctgtcttgtgccaattttcaaagggaatgcttccagtttttgcccattcagtacgatattggctgtgggtttgtcatagatagctcttattattttgagatacttcccatcagtacctaatttattgagagtttttagcatgaagggttgttgaattttgtcaaaggccttttctgcatctgttgggataatcatatggtttttgtcattggttctgtttatatgctggattacatttattgattttcgtatgttgaaccagccttgcatcccagggatgaagcccacttgatcatggtggataagctttttgatgtgctgctggatcggttttattttctaatttgagttgtcctttatttctttttctttcttttaatttcaacttttactgtagattcatgggtacatttgcaggtttgttacatgaatatatcgcatgatactgaggttgtggtacgattgatcctatcacccaggtcatgagtgtagtacccaatagatagtttttcaacccttgtgcctcttctttcctccgcactctagtagtcctcattgtctattgttcctatctttatgtccatgtgtacccaatgtgtagctgccacatataagtgagaatatagggtatttggttttctgtttctgcattaatttgcttaggataatgacctccaactacatccatgttgctgcaagggatattttttttgttcttttctgtggctgtgtagtgttctatggtgtatatgtaccacattttatttgttaattcaccactgatgggcatctaggttgattccaggtctttgctatagtgaataatactatgatggacatgtgagtgccttgtctttttggtagaacaatttattttcctttgagtatatacccagtaatgggattgctgggtcaaatggtggttctatttttagctcttggctattttctttttattttctaccctgctctaaattccttaggggttgggattttcatcagctttgttcgttgatgtgtgaatgttgcttattacctacaactgctgaatgagtgtgaatgaatatgaatgacaaacaaatacattgtggtggggtaagccagtgaagcccggatgagtgaaggctgagaggaaggcaaatgaggggctaagagtggtatattcttgataagagcagaggatgcctgaagaagatgattgagtctgaggtgtttggggcttaatttggggacttaggtcgtggtgtttagacattttcttttgtatgaaagggggactcttgagtagggagatgatcatacttttagaagatacatgaagatakctctttcttctctgagagtgttctggcatgatgaggaatgatccagacgctgagaggcaaaactagtcaaggagttaaatacattgctcttagtcctgttggtgacatccagactctttagtccactttgattccttaatctgccttgttgggcaggctgacactggcttctcagaagtttcttgtccttatgaaagaataaaccttcataatttttgtcactctcaaygagattcttagaatgctgaggagctgccactggagctgaaataatttgagacataatatgtggggttaggaataatgccatgggaaatctttttgtgaattatgacttctagatgtgagcctagataaaaccctaatgtttgtaaacattgtcatcttaaaagcacttaactctttggactgtttggttgttgggggtgggaaaaataatattcatttacagataacagagtatataaactaccagcacatttctaagaactgargtaattatctgggatgggaattctattctgagtttattgcatactctaattaggtcacttcatatctgattaacttttaatatattgcttcttgctttttatataagtaaagtcactgatggtatgcaattatgtagaattctgaattatgccagatgattttctaagaaaccagttcaatgtgacagcaattgatatatcttagagattttaaatgagtggatttcttcctttcattcagtgcgacatgttacttgtatcttagagattttaaatgagtagatttttttcctgattgtgaaataatgcatgctcattgataggatttgggaaatgaaactgataatttttgccatcctgtggtagtcactattaatattttcggtggatttttgccattaaacaaaagcggaaatactgcttagcttgtattgtactttgttcatttaatattttataatgaacatttttatgtattattattcttccaaacataattttaaaggatatgaaggatatctttccatgcatcatgagttcatgtattttgctcctcagcaagacgacttgtaattggcctcatgcaataaagcagcagctgttttagaggctcttattttatgttctagcctggttatgataagagagaattaaaaacatagtccttgtcctcaaaagacatgaaacctggggccttggtaatataggaaaccttcttgccaatataggaatatgttgacatattagctatagcaaaaggcttatattagcaccgaatgaggctctgctgcatccattcacctagggaatatgcactgtggcgcttcccaaaggatcacttgcaggtacctcagtgtacctgatggcttgactgttgttgcagccattagtacatctcccttcttgccacctttctctccccaaatctcaacaaaaccagttgtttttaatyttaacactacccatcaccctcctacactcactgaaatgtcttcagcccctaacctctagaagagctgaggacatcatggaaggaaggtaagtctttctctgaaagagattgtagacctgggatataatggataaagtgatccccaagatgcacttttgatgttttaatttctcagattttttttgctagatacttactttgcattgctttgttgttgttttgtgaaagaacagacttctaattttaaaacacaaggtgaagaaatgttaaaaaaaaaaaaaaaaaaaaacaaaggcgtaagatcaagtgatgagttaaaatgccagttctgccatccttgatgtagttctccctttgattgttctcacttgaaagaatgccttttccttcccattgtggagtactacctgctgtcagttggagagggggtaagttgagcaacctgtcaaagactttctaagctcccttcatatggttcacagaaacagggctggattttcatttcttctttcattcaacaggagtctctttcatgtttgaaaattggaaacgtgtgtttttcagtgtggagcgaggatgtgtgtgccctctggcacacctgtttctaatttcctgacttgaaagcataactcatcaaaaggaggagaaaaacaatttctttgtgacatgctgcttcatggcccttgctggactcaaggccttcgtgggtttgccaccttggttccctctgtagaaggttcttgtgaratgcagaattcactaaatacaactagtgccttttatggcacagggctgtttttggtattattttgctgtagttcttttcagctcaggaaatttacttgaagtaagatttattttaaaaaatatattaaatttagctgaacagtatatgtkggaaggatatctgtaaactgatcagtgagccgactggctaggaatagggtttggttgagcatacgaatgtttaaattccatagttctgtttaacataaatcaaatagttccaatgggttgcttcatatttgtgtgtactttaaagtcatgccagcttaaatgactgtgaggtacaatgtgttgactttgagttttgtaaattgataatttgttgctatgaaagttgtccatggtataactcatcactttttgaaggtacttagtatgtctgatactggcaagctgtcatgaaaaaattgatgcccagggaattccggggttttgctttcagatgtttgacatgtagatatttaattcttcttaagatttccctggacattgtcagtgtaaggtgtactgatctttaaacacaaactttagtttgggctcctgtttctcagcattctttgggataataatctgaatggtgtattctcaagtttttttttttttttttttttaagtgtatgaatcaccttggggatcttgttaaaaggcaggctatgatccagtgggtctgggatgagtcttgggattctacattttcgcaagctcccagataatgccagtgctgctggtccacagacagtactttaagcagcaagacaacactttgatggacaaagtggtgctgtgcaacacccatcacatacaaattaccagttgctttcctcattgtgttttggtgcatctaaagctaagatgatctggtgtatattcttgactcttgggtatccctgtgagcattaatgaatagtttaacaaccgaccatttggtctagcatgtatggagactaccaagacaggcttattgtgttggaagaagtgatgcttatgtttttagactcttatggaatataccaattcctgtatgttagccaaggttcttgctgcaaacagaagtgaatacaacaaactgctaacttgaaaagatgctgatagaggggttagaaaggcatagtgctgaatcaaatgtatttattttaactagctctgttcatgatggctggttaatttgggcaaaaagatttattgatgaatcatggagaaaaagtgggaacatgtaaatgtaaaatgtagaaacagtttgcatttttattaacttgttattgaatgtatgtcatggttctcattagtgaattgcagcatgatccagcccacagtataaaatgccacgattaaagataccttacatttttattttcagaatgttttgttcatatcatgaaaagtacacttatttgtatgttgtgtttttcttttagctttgatgaaaaagaattgaaataaatactgactagtagaaagcatggatagttgttttaaaaaatctcagttggatattgaagaaatagagacttcaactaaaattctacaatggtattttaggtctgcctgtacctacattgaattgaagagcaagtacacttaggggcacattgaggtgagggatttatgggctttggaatcagacttcagcttgaatcctaacggagggagcagattggaaggattgtgcccatccatcccagaattgggacacctttccttatggaggagaaacacacagctatgctaattatcatggatgttctcacttcgcaccattgcatttcctgttagtcgggactctgttatggctgtgtttaataatgctgaggagttcttgtttctccatttctctctctctatcccagccctagaatgttttactggttcttcaaaatttcctagtaaattatatatgttgtaatctatcataatgatcactgtttactaatattgatgatagaataattaataggctcccaattgaaatctgctaagatgatgtagtgatgtgttctcagatatataaaagagtatttactgcagtatagctaagatagctagtaaaattcatgtcagagaataataaggatttgaagatttgctgcacatttgtttcacctgagttctttcttgtccttaaaatttagatttgcctctgctctacctgttatgctttccttctcatgcaaaagtaaattttgtgggatatggaaatataatattctcaagttaaagattttttatctttgttttacataccctcctttgtctgactcatcttacctgttttgattttattcttcatcttagtagcaggtctttctttgtagcttttcatatcagaattataacatttgtatctggaataagcataagcaatgtagtcctggactttcctcagaaccacctttgcaagttaaaccctgcctgtgccatcaagttcatagacagttttcagccactcactatgggaattgcacaggtttgtcttattaatctacaagtctgggcaactcttattatttaatagaaagtcctagctaccgtcattcactttattttttctttctgctataattgcaatgtaaacaacttagcacaatttcttgaggagtgcatgtttctctttttgctcttgtttagaatcccttccctccttatccatgtggtgaagcctgagatgagctaaatatcttctcttttctgcagccattctccctctctgtctccccacttcttgctctgccttctgtctctctccctccctccctccctcttttgtttcttcccatgcccaacttcaaagatttactccctccaaggtcagtggtgccatgatgtggaacttatactactcgtatggttgtttttctccagaaagcctaggagctccttgaggacgagactattggcttaaagatatagtaggtactcaataaacatcagttgaattgaattcaggaaccctttacttttttgaagcactgtcaaacagattctgattggcaaaatgactgacttgttcctcattggtaaactggaactagtgttcctgtttgctactttaaagttcatatggaaccaaaaaagagcccacattgccaagacaatcctaagccaaaagaacaaagctggaggcatctcgctacctgacttcaaactatactacaaggctacagtaaccaaaacagcatggtactggtaccaaaacagagatatagaccaatggaacagaacagagccctcagaaataatatcacacatctacaaccatctgatctttgacaaacctgacaaaaacaagcaatggggaaaggattccctatttaataaatggtgccgggaaaactggctagctgtatgtagaaggctgaaactggatcccttccttacactttatacaaaaattaattcaagatggatcaaagacttaaatgttagacctaaaaccataaaaaccatataagaaaacctaggcaataccattcaggacataggcatgggcaaagacttcatgactaatataccaaaagcaatggcaacaaaagccaaaattgacaaatgggatctaattaaactaaagagcttctgcacagcaaaaaaactactatcagagtgaacaggcaacctacagaatgggagaaaagttttgcaatctactcatctgacaaagggctaatagccagaacctacaaagaactccaacaaatttacaagaaaaaaacaaccttatcaaaaagtgggcaaagaagatgaacagacacttctcaaaagaagacatttatgcagccaacagacacatgaaaaaatgctcatcatcactgcttatcagataaatgcaaatcaaaaccacaatgagataccatctcacaccagttagaatggtgatcattaagaagtcaggaaacaacagatgctggagaggatgtggagaaataggaacacttttacactgttggtaggactgtaaactagttcaaccattgtggaagacagtgtggcgattcctcagggatctagaactagaaataccatttgacccagccatcccattactgggtatatacccaaaggattataaaacatgctgctataaagacacatgcacaggtatgtatattgcggcactatttgcaatagcagagacttggaaccaacccaagtgtccatcaatggtagagtggattaagaaaatgtggcacatatacaccatggaatagtatacagccataaaaaaggatgagttcatgtcctttgtagggacatggatgaagctggaaaccatcattctcagcaaactatcgcaaggacaaaaaaccaaacacctcatgttctcactcataggtgagaattgaacaatgagaacacttggacacaggaagggaaacgtcacacactggagcctgttgtggggtgggggaggggggagggatagcattaggagatatacctaatgttaaatgacaagttaatgggtggggtgcagcacaccaacatggcacatgtatacagatgtaacaaacctgtacattgtgcacatgtaccctagaacttaaagtatgataataataataaaaaaacccggaacttcaggtattcatggtagaggctttgttctatgaagtgaagggtagtttaagtttggattggtgtagttttgataaaatctattacccttttcccttactgtagtgattagggtgctttgggttgcagttaacggaaattacagcacaaattggcttcaataataagaaaatacatgattttgcataagaggaagttcagaggtaggaagactccagggttaatttgttcacgggctccattgatgacatcaaggacctggttctccacttctcttgcttgctccgttgcttcattgttggcttctttcttgggctgatagcccagtggctactgcattgccagaaaactcatcacaaaaagatctccagaggaattaaaaaaaaaatcttcttttagtttttttttttttcctaggaatgaggaactctttctttagaagctccccagcagacttctcagtcaatgttttgttgattggctaatgtcgtatgtttatttctggatcaatcactgacagaggaaaatgggattacccatgaaccagtgatgagtacaggacatgcgtatgggttatgtacatgactgtgggtgggtggaaagcagaaggaaatcaaatttcattctggaaaggagaagggagtagatgtgtaggtggtggccaccggtatcctactaaacttgacacttgccatcattctgtgatcagtaataargatgaaccaaaaactaaaagagataataataaggatgataacagtagttagcatttgttgagcatgtgccatggtcaggtactgtgctgagtactttttacataatgattctctttttcaagtaaagctgtagttcagagaggtcaaacagrgcctgaatgcccgaggaatatagtgtgtcttccctcaatgaaggtagaataatgtgagaaggaagaagaaaggctaaatttaaatttaattagctatttttatttttactagaaaagttatagattaggtatttagagagttaaaaaaatcatgtaattttcatttaaatctgttcttaccaaarccatgcatcttttatttttggctaacagagagctggccatagaaaatggatgtttttgttttgaaaaatcaaatatagtagataaaaaaatgccaccacaaagtttgtttatatcttcatttcacttaaattgagtagaagaagtggaatctggcctttttcatattgtttatgttctgctttgcttcttggttctggggcaagattcctagttgtgtttgaatttgttttcctctcaagtatcatttgcaaaattagtgtggaaattaataaactctttctgttcaataagtgttgtaactgtcctaatatgacatagtataatgctgtttcattagcatagtaaaattcaaatatgtgctcatttagcctcattctactgttttttttttaagtctagaaaagaaggaaggtgctttgcataagtaaccaatataatctttatttattaactttcattttaggttcaggggtacacgtamaggtttgttatataggtaaattgcaggggtttggtgtacagattatttcatcacccaggtaataagcatagtacccagtaggtagttttttgaccaggaaggtgaaagatctctacaacaagaattacaaggccagacgtggtggctcacgcctgtaatcccagcactttgggaggccaaggtgggtggatcacaaggtcaggagtttgagaccagcctgtccaatatggtgaaaccctgtctctactaaaaaatacaaaaattagccgggcgtgatggtgcgcgcctgtagtctcagctagtcaggaggctgaggcaggagaatcgcttgaacccaggaaggtggaagttgcggttggccgagattgcaccattgcactccagcctgggtgacagagactccttctcaagaaaaacaaaaacaaaaacaggaaaagaattacaaaacactkcttaaagaaatcagagatgacacagacaaatggaaaaacgtgagatgattgccacaatcaaactaattaacataatccatcaactcacatagttaccttttttggtgtcgtgagaataaagatctactctctcagcaaagttcagttctacaatacattattattaactgtaatcacaatgctaatacattaatcctccagaatttattcatcttacaaccataagttcgtaccctgtgacactatctcctcatttcctcaccctggtaaacactcttctattctctgtttctataagcttgactttagatttttatatataagtgagaacatgctgtagttgtctttttttgtttggcttatttcacttagcctgatatcctctaagttcatccatgttgtcacaaaygacaggattttcttggttttaaaggctaaatcmcacacacacacacacacacacacacacacacacacactttcttcattcattcattcattcattgatagacacttaggtagtttccatatcttggctattgtgaataatgctgcagggaacattggagtgcaattgtctgtttgaggtactgatttcatttcctttgcatatacaacgagaagtgggattgttcgattatatggtagttctgtttttaactttttgaggaacctccatgttgttttccagaatggctgtactaatttataattccaccaacagtgtacaagggttcccttttctccacatccttgtcaacactttttattttttgatgttttggtagtagccatcctaagaggtgtgagggaatacctcattgtggttttgatttgcacttccctgatagtgatgttgaacaacttttcatataactacctattggctatttgtgtatctttgggagaatgtcctattcatgtcctttgtccmttataaaaaataaagttattttagtttattttattttttgctagtgaggtccttatatattttggattttaatcccttattggctacagattgagtatcctttatctgaaatgctgggcaccagaagttttttgaatttcggagtttttcagattttggaataattgcagaatacataccagttgagcatccctaatctgaaaattggaaatctgaaatgccccaatgagcatttcctttgagyatcatgttggcactcaaaaaatttcaaattttggagcatttcagcttttagatttttgggttaggtatgctcaactagtatttagtttgcaaatattttttcccattcaatggattgctttcattttgttgattgtctcctttgctgtgcagaaacctttcagtttgatgtagtcctacttgcttatttttgcttttgttgcctgtgcttttgttgtcatatcaaaaaaaaaaaatcatttccaacacatttgtcatggagcttcttccctatgttttcttctaggagttttactcctttagttttactcttccaggagtctaggtattatgtttaaatctttaatctattttgagttggtttttgtgtatggtataaggatccaattttattttttgcacgtagatattcagttttttcaacccgatttttgaagagaacatcccttctccattgtgtgttttattgcctttgtcaaagattagttgactgcatatgtgtgggtttatttctaggctttctattctgttccattgatctgtgtttctgtttttatgccagtgccacactattttggttactatagctttgtaatataatttgaagttaggacacatgatgcttccacccttgtttttcttgcacaagattgcattagctaattagggtgttttgtggttctgtatgaattttagcattgttctttctatttctgtgaaaaacatcattgaaattttgataaggattacattcaatctgtggatcactttgggtagtatggatgttttgacagtattctttcagtccgtgaacacagaacacagatagctgcacttatttttttcttcagtttcttcatcattattttatagcttttatttttgtttttttcttttgagacagggtctcactgtgtcacccaggctggagtacagttgcacaatcatggctcaatggaatcgcctcctgggctcaagtgatcctcccacctcagcctcctgaataggtgggactacggacacgtgccaccatgcccggatattatttttatttttcgtaaagatgaggtcttggctatgttgccaggctggtctcaaactcctggactcaagcaatcctcatgctttggcctcccaaaatgctgggattataggagtgagccactgttcctagcccaatgttttatagttttgagtgtacaggtcttttatcttcttagttaaatttatatctgaatattttattctttttgatgctattataaatgggattattttcttaatatctttttggatattttattgttagtgtatagaaatgcaactgatttttgtatgttgattttgtgtcctgcaactgtactgaatttgtttattttaatagttttttgatgaagtatttacagttttctatatataacattttgtcatctgccaatagtaacagttttacttctccctttctgatttggatgcctttttgtttaggcaaacaaaaatggaaacacaatgtaccaaaattctctctcttttgtttttttttttggcctaatttctctggctaagacttgcagtactgtgttgaaaagaagtgatgagagtgggtatccttatcttgttcctgatgttagaggaaaagctttcaacttttgaccattgaagttgaggtctttattgtgttgaggtgcattctgtacctaatttgttgagagtttctttttttaatcatgaaagcatgttgaattttctcaagtgcttcttctgtctctcttgagatgatcatatggtttttgttcttcattctattaatgtgktgtgtcccatttataaatttgcwtatgggagccatccttacattctggagacaaatctcacttggtcatggtgaatgaacattttaatgtgctattgaattcagtttgctagtattttattgrgaatttttgcatctgtgtcatcaaggatattggacagtaattttcttttcttacaatgcctttgcttagctttggtatgaaggcaatgctgctcttgtaaaatgagtttggaaatattccctcttacttggttttttgaaagagttgagaaggattgttattagttctttaaatgtttggtagaactcagtagcaaagctaccaggttctgggcttttcttggatgagagattcttgattactgattcaatttccttacttcttattggtctgttgagattttctttttcttcatgattcaatgttggtagattrtatatttctaggaatttatgcatttctactaggttatctaatttgttagcatataattgttcatggtagtgtcttgtaatcttttggatttctgtggtatcagttgtaatgtgtcttttttcatttatgattttattttagtcttttttcttttattcttagtctagctaaaagtttgtcaattttgtttctcttttctaaaacagcttggttttgttgatcttttctattggttatctagtcttgattttatttatttctgctctgatctttgttatttccttccttctgctaactttggccttcgtatgtttttctttttctagtttattgaagtataaaattaggttgtttgtttaaggtctttcttttttcatgtaggtgtatgttgctgttaacttctgttttagaactgctttttctgcacacatacattttgttatgttgtgtttccatttttgtttgtctcagatattttaaaatttcccttttaatttcttccttgacccattgtttctttcagagtgtgttatttaatttccatatatttgcaaattttctagttttccacctgtttctatttaattctgttgtggctgggaaagacttggtatgatttcaatgttcttaaatttgttaagagtttttttgtggcctagcacatcctggaaagtatcctgtgtgcacttgagaaaatcctgcagagttgagctggctmtctgtatatttggctgctgttgggtggaatgttctgtatgtctgttaggtccattagatctaacatatagttcaaatttaatgtttccttattttctatttgcataatctatccattgttgaaagtgggatattgaagttctctactattattttattgctatctgtcctcttcagatctgttaatatttgtttaggtattctgatgatgggtacatatgtatttacaattgttacatccttttggtgaattaatcactttatcattctataatgacctgctttatctgttgttacaccttttgacttgaagtctactttgtcttataataaatatagctcccccgctgtcttttggttttcatttatatctttttttcatcccttcatttttaatctatgtgtatccttaaagctttagtgagtgtatatagcatatagttgggtctgtatgccactgtttgcctttttattgtagaatttagtatatttacattcaatgtaattattgatagtagggatgtactattgccgttttgttattttctgggtgttttgtagaccctttgttcttttcttgctgtctttgtgatttgatgactttctgtaatgtcatgctcttttgctttgtagttactatgaaacatacataaaaattgtatagttatgaaaatctattttaagctaacagctaactttgattagatatgaaaactctacagttttatctccctatccattttatgtttttgataccacaatttacatctttttatgttgtgtatctgttaacaaattattgtagctacaggtatttttaaatatttttgtcttttaaccattataccagagttatgtcttttatataccatcaattcagtattaaagtattctaaacttgactatgtcctttccttcaccaacgagttttataccttgatatgttttcatgttactaaatagcatcctttcatttcagctagtagaactccctttagcatttcttgtaaaacaagtttaatgatggtgaactcctttaagtttgtttttctgggaaaacctttatttttccttttctgaaggacagctttgccaggtaaaatattctcggttggcaggattttgtttgtttgtttttgtttttaattctggcacttcaaatacattatcctactctctcctggcctgcaaggtttctactgagaaatctgttgacacctttgggaattttcttgtatgtgatgagcctctcttgctgctttaaaattttctccctttgcatttggtttttgatgatttgataataatgtatcttgatgaagtatgttttcagtggaagctgtttagagacatttgagcttcttgtatttggatgcctatatctctccccagatttgagtagtttttaactcttaaaaaaaagctatgtgtctttctttctctttctcttctcctgtttgaacttccataatgctagatggtactccataaatcctgtaggctttatttcttttcatttttttttcttctctgatggaatatttttaaatgagctgtctttgagttcacagattctttcaaatctttatcagattgattctttatcaagtctgctgttaatgttctctattaaattttttcatttcattgattgtatttttcagaatctgtttgtgattattttgcatgattttaatctttttattaaatttcttattttgttcatgtatgtttttctgattttattgtgttgtctatatattttttgtagcttgctgagcttcccaaaaacaattattttgaattatttttcagacaatttgtagatctccatttttttgatcaattaatgggatattattatgtttctttgatagtgtcatgtttcctcaactttttgttctttgacatgttgcattactggctttgcagttgaagcaattatgtcctccagtctctactaactagtttcaagagagaaacaccttcaccagtcagcccagctagggattctgagacgctcttaaaccttttttttacgcctattccatgtcttttattcgcttttgttttggggaggtattcttaatattttatgccttttctcaatcctgcagagttgagctggctatctgcacaagacacttctatttgccatccatggggtcatgcttggggagttggcctgggggaaggtgttgtgaatagagaatttggggtgcccatggggctgtttaggggtgttacacaggcaaggcatcccacatggcttgtgtgcaggctttctgaaggagtcatggagtggttagtagcatcagggcctccctccccttccttctcctaacctcctcaactacttaattgtgccaatcacttcagtattctgggtggggcaagaaagaagtgggcttcctggacagcatcctgcacagctggggtacccaggagcttactcactgcactctcactttccattgtgagagaaattgtggtgagggtatctcttttggcactgagctgtgccaccttgggggaggggcgataagggtcatccctcttacccatcctcttcttagtctcttcagtgcatttattctggatcttgtgctccaactgtgtgctaaaacttctctgttggactctggactcccacagatgtattttcctttgtaggtagtggtcaaattgatgctcctttaggggattgatgatagaaaacttctattccaccatcttgcttatgtcactctgattaataacactgttgcagcctctcctaccttgtcacaaattctctgattaataatactgttgcaccctctcctaccttgtcacaaattcttctccatgggtaaccactattttgaaatttgtgtatcattcccttgctttaagcagaatgtttaatcatatatgtatgcatccccaaataatatattgttagttttatggtttttattgacctataggtctatggtatcatatgttgtatagtcctctgtgttttacttcttttactaagtatacttttataattgtccatatagttgccatgtcactctagtgcatttattttagttgttgtttaatattccattgtgtgactataggccagagttttatacattctcctgcatttattaactgtagttcttctaaaaagacgaccttttgcttatctatttggctacccagaggaatagttcataaagtaaaggcagaaaagatgttcacatctttttttaatgtattatttttcaaaataaagagatgatgcacagataatctcctaagacatccaattaggtttcattttatgtattaaaatatttcctatttatttatttgctcatttataaaattactaatttatgatttttatatatttgatgtatttcaatctgttatatccattatatttttcccattatttagatgctttgttactaagtgtacacacatttagattgttatgtcttctattaattgacactttcataattgacacttttatcataaaatattctctttgtctctggataatttgctttgtttttatgtaactttgtttaatattaatatagtcagagcaactttcttatccttagtacttgtctgctatatgttttttatctgttttacttttagcctattttgtctgtatagtaaagtatatttcttataaacaaacaacaattgggtctcccatttattaataaaaagattattctagattgataacccgtgccttttacatggagtatttagtccatttatgtttaatgtaagtattgatgtaattgggctaaatataccaccttgctttttgttttctattctttcgttttattgttcttttcttctccgtaaatattttgccatcattctatgtattatgttttctgtagttgctgtagggaattataatatacatcattaatttaccatggtccacttaggataatgttactttatgacaatgcaagaaacttaaaaagttaagttcattatttctttcccatcctttgagctcttggcatattatgttacaaattctaaaatatattattgtgttagatattcagttgtcttttaaaaaatttacacatgtactcacacacactaaatatatatacttttaaacttactgaatgagttccactttctgatgctttctttttaaagaaagagctcagggttctctctggtattgttttccttaacctaaacaaatgccctttagtatttttatatttcatgtttcctgatgatgagtcttcccagctttgtttatcagaaatatctttacttcccctttgcttttgaaggatgttttctctgcatagagaattctgtgttggcttttttctttcaataattaaaaaatgtcatcccactatctttttgcatccattgtttctggtgagaagtatctgtagtggtctctttgtatgtaatgtatctttttttcccatgtgtttttaatatttcatatttgctttccagcagttttactatggtgtccttaaatgtgatagtatttgcattatccattttggagttttctgaggttattgggttgttaggtgtggaaaattcttagctattatattttcagttatttattctggcgtgttctctcttttacttctagggctgcggttatatgcattcgatattgttctacagacattggataccacattcctatttattcattcttttcctctttgtatttcagtttggataatttctcatgactatatcaagttcaatgatccttttgtttgctgtcttttgcttgctctaaagcccactgaatgcattttcacttgtgatactttttcattttgtgtatttctttttgatttattttaataggttttctatgttggagtttcccatcttttaggaatatttttttcacttacataaattatttttcatttaaaaaccttatctgataattccaacatctgggctattagtagtctacttctgttgcctgttccttctcttgtttcccagtcacactatttcttactttttcatatgtcttataattattgattgtatactaaacattatatttgaaaacagaagagactgcagaagatatttgcctctgaaaaagggtacagtctttcttattccatgcatctagtatgacaaattgagtgtatatatatatatacacacatacacagacacacacacacatttttatatagatgctttatacatataaacatatataaatgttttatacatataaaacatttcagccctttatacatataaaacatttatatatgtatttttgtttttataggtccagggtgtgtgtgtgcaggtttgttacatggatatgtcacataatagtgaggtttgggcttctagtgtatccatcactcaaattgtgaacactctacccagtaggtaatttttcaacccttatcctcctttcaccctccactcatttgaagtcctcagtgtctattatttccttctgtatgttcatgtgtactcattgtatagctcccatttatgagagagaacatatagtatttgattttctgtttttgagttatttcatttaggataatggcmttgagcttcatccatgttactgtaaaaggtgtgatttttattattttttatggctgcatagtattccatggtttatatatactacatttttttggcttaaataacaagcattattatttcacaggagaaattctcaagaaaggtgcttcggtggttggtggttggtttattcagcatcaaagactccattcctttccgtctttctgctccaccatcctcaactcttgactttggtactcaggcttgcccctttatggtcataaggtggctgcagatgctccaagtatcatagtctgttcaacaaaattcaaaaactgggtgaagtaactaacagctttgccttgcgttgccttttcttttctctttctttctttttttttttttaaagagatttcagcttttattttagattcagggggtacgtgtgcaggtttgttacatgggtatattgtgtgacactgatctcatcacccaggtagtgagtgtagtacccaataggtagtttttcagcccttgcacccctccatcaatcttccctgtagtagtccctggtgtctattgttttcatatttatgaccatatatacccaatgtttagctcccatttataggtgtgaacatgtggtatttggttttctgtttttgtgttagtttgcttaggatgatgacttccacctacatttatgttgctgcgaaggacatattttcattcttttttatatttacgtattttccagggcgtatatgtaccacattttctttaatccaccattaatakgcacctcggttgattctatgtctttgctattgtgaatagtcctgtgatgaacatatgagtgcatgtgccttttttgtagcatactttattttcctttgggtatatacttggtaatgggattgctgggtcatgtggtagttttgtttttagttctttgagaagaaatctccaaactgctttccacagtggttgaactaatttatattcccaccaacagtgtataagtgttctcttttctccacagctttgccaacacctttttttttttttttttgccttttttataatagccattctaactggtgtgagatggtatctcattgtgaatttgatttgtgtttctctgatcagtagcgatgttgaacatttttttttttggtatgtttgttggccatttgtatgtcttcttttgaaaagtgtttgttcaggctgggcatggtggcccacgcctataatcctagcactttgagaggccgaggcggtcaggagttcaagaccagcttggccaacatggtgaaaccctatgtctactaaaaatacaaaaattagctgggcgtggtggtgggtgcctgtagtaccagctacttgggaggctgaggcattagaatcgcttgaacctgggaggcagaggctgcagtgaactaatattgcaccactgcactccagcctgtgtgacaaaatgagactccatcacacacacacacacacacacacacacacacacacacacacacacacacacacaaaagaaaagaaaaagtgtttgttcatgtcctttgcctactttttaatgggattwtttstttttagtttattgagttaagttccttatagattcaggatattagacatttgtcagaaacatagtttgcaaatattttctcccattgtgtggattgtctgtctactctgttgatgggttcttttgctgtgcaaaagctctttagtttaattggatccctcttgtcaatttttgtttttattgcagttgcttttgaggtcttagtcatatattctttgccaaggctgttgtccaggatggtatttcctaggttttcttctaggatttttatagtttgagatccaccttgagttaatttttgtatatggtgaaaggtaggggtccaatttcattcttctgtgtatggctaaccagttatcccagcaccaattattaaatacagagtcatttcttcattgctaatttttgtcagctttgttgaaggtcagatggttgtaggtgtatggctttatttctgagttttctattctgttccactggtctatgtgtctgtttttttaccagtaccatactgttttggttattgtagcyttgtagtataatttaaagtcagatagtgtgatgcctccagctttcttctttttgcttaggattgccctgtctctttgggctcttttttgtttccatatgctggcttgagatattctgatggtagtgtcaagtcttactattcagcaaaggctgggatccgagcaccagcaaaactccagatatctctttatctatttatctatttatagaccagctgtcagctttaggaagggggaatttctctctttctcttgccttctgtcttttacagcctagctttcagcttattgggtcactggggatatttttactttcacccacctatgagatcttcctttgtcttaccactctggtctcacactttggtggacagttgcagtgcacttagggaagatccagtgtgcttctgagggatttctttcagctcttttttacttttcccattgcttggtggctgctgccttgcagtaagtgatggctctctgcatccaggttggctcttctccttcagctctcttgttgtgtccccagacttcaaaatgctgctgcttttcacttgccaaagaacttatgcacctcagggtgtggatatctttcagctctcctgctctaccctacatttttggagctattagtgaagacctgtaggaaagaattgatgaatggattcagccttgtttagtgaatggggtttcttttgattctgatgcatcatggtagctcacatgtagtcatttgaagtttattaaagttcaactaatttcttgtcctcatctacagcatttattctttttccactgcttccttaggaatagaagagaccatggctctgttttctcataggaaaggcttrtcttttttggaattaggtttattgagatatttgtgcattttcgttaaaaaacccatgactgtagcttatctggcttgctattgttattacagtgggagtgctggactcttggaagtttcttcatcctaactagaagtggaaatttcagggatctgttttggaggcttgtgagacatattagaggatttagaaccattattttagctggtaaaattgtccatcttttggcactggagcccctttatgttggtttctgtgatctttgactttactatctttggtaattttcttgtttttgggtagaacaagatgcctcagactcctcttgaatacatcttttatgagacccagagacccagaaccagccatttctccaatgatcctcctcctcctttttttttttaagtaggaaatgtgattttaacataataatctagtttccaaatttttactgcaattttcatgttagcctctaggcgatgatagtatcactgtagttcatgggtccagcagcagtattaaaaatcaaaatcagaccgggcgcagtggctcactcctgtaatcccagcactttgggaggccaaggcgggtggatcacctgaggtcaggagtttgagaccagcctggccaacatggcaaaaccctgtctctactaaaaaatacaaaaattaaccaggtgtggtggcaggcacctgtaatcccagctcctcaggaggctgaggcaggagaatggcttgaacccgggaagcagaggttgcagtgagctgagatcgcactagggcactccagcctgggtgacagagcaagactctgtttcaaggaagaaaaaaaaaatcaaaatcaaattgaaaccttagcctacaggtttaaaaccatacgcttatagatttttaaataaaattatagccatgtggtttcttaatttgggatttgtagaccctatggaatctatgtattggtttttatggggcattctgtgaatttcctgagactatatgaaacattttagtccaagatatatctttttctcatgacctgagagagattgggaagcacagtcttaggtaattttgaataaaactgtaagttaacttgctggctaaaataaattaaataaataaatttaacaagtaatacaagttgatrtagttccttcttttcctgttattatttcttagtaatagtgtcaaatgaaaaccttgaagagtcccaaattgtatattgtctatttgtcttttgttacctaactcatttgaggtggccttcctgtattttgcccctttcttcttttatctgctwctttcatctgataatttttctagttggtggtaagacagcttttggacaatttctgtattgatattccttaaattctacccagatgtagagaataaaatatgaatactattttctccttcctccttcagagcagtgtgtctttccctrccctcaaaacttcccttgatactgtattgaatagagaaagggataagcaatgactggtgagcagatttaagacttttttctatggtactttatttggcctctaaatactgaatgttgtttttaaactttgcgtacagctttaaagctgatgaaatgatttatattgcctctcctttgtacagaggaatttattgagaaataacatyggctcaaacttccttttcagcttttaaagagatcaaaatgaccccaataaattacttctaaattttaagtcattaagaaaattattaattaaatatttaatatatgtggctggctcagtagttataggttagatttatggtgtagtataactgtcttgcttatgttctttctgtttgtggactttataccacatatataatcaatatgtatagtgaaatattttacatgacatctgcatatttgtagatgtttataactgcattttggctttggttttttttttctggctcatgaaatgcacaccatggcttagaggcaaaataaaatctttaattttattttgttgggatgtgcttggtgacttactatttataggactttctggttaaaattggagactatctacagtcctaagtgttagtatcagaacctgttgtgctccttatttgcagataattattactatgatcttgtccayattctcagatttttggggctttggattttctttgtttatatctcctttattcatgtgatgatattagcctggtttctgcagtgactgttatggaatgagcatgttactaggagtcacaatacttggatcttagaatcttagttcttccaaatcacttttcttgtttgtcagatgagatgatagtactttccttgcaagataattctaaagccccagatatacagtagttgattatttaatcagtgagtcagtgagtcagtgaccctttctccctaaaaaaattaagttttctataattgaatttaatctaagtatattttttcattaattaacagcttttaaaaagggttttctcaagtcatctgcctattgcaagcctcttaactatattttaaccagcaagttattaaagttctaaaactacattcagtggtaaatattttgtcttgtgaggaatataaaactattaaagctaagccatttagtttttcaaatgaggaagctgaagcatagatgtcataagtgactcatttcaggttctacagccagagctggttctyctcatatgtgatccttctctctgatggaacaggaatccagatagaagattgacaagagcatcaactgaacattacaaacagtgttgcttcttttatggctactttcctaatgaagttctcaggtgtggataaatctaatgcttatacatatactctgtttcccagataaatacaatatagtgatacaatcttagcagcaccaccatagataagaataccacttttactggtgatggttgcctctgattttttttcctccttccctgggttcatttgtccctgatgctctaattagagtgttataatttaggtaactaaatttaaataatttagaacagaaagcaaggttctgctttatctcctgtattaacactcaaaatgaatattgggtaaatttctacattgagatgtgtattagggttctccagagggacagaacttataggatatttatgtatatgaaagggagtttattagggagaactggcttacctgattacaaggtgaagtcccaggatagaccatctgcaagctggggaagaaagaatccagtagtggctcagtctgagtccgaaagcctcaaaaccagggaagctgacagtgcacccttcagtctgtggccaaaggcycaagakcccccagcaaaccaatggtgtaagtgcaggaatccaaaggctgaagaacctgaagtatgatgtccaagggcaggaggagcaggaggaagcatccagtataggaaagggaaaagccagaagacccagcaaacaaagttatcccaccttcttccccctgctttgtctttgctgtgctggcagccagttggatagcacctacccacattgagggtgggtcttcctctcctaatccactgactcaaatgtcagtctcytctggcagcaccctcacagacacacccagaagagcaaggaaaagagagtggctgaagctttgtcaattacacacttcctctgacatggtagaygggatgaagcgttttcactactcatgtttgttgaaggtttttttgtttgtttgtttttttggttttagtttttttcaaaaaggttttaatctgtgaaagtatttgcgttcataaaactggaacctttcctatttatggagctacttatttagacagttgggatttttcgtatgagtgtgtgatttggttatatcctcaataaaattggcagtagtgataaaaactaatatatgtataaagcacttagtatatgtactatatgtctagcaccgtgctctagatatctgtgtttaatcataactgtgataatatttctctatattaaaaataattatgaaatgctaacgcatatatcaatcacaccctactttgtaagagatgatatctctaggagataattataaaattggtttttcttttggttattatttatcacagaaaaaattgaaaagcctgagttgtttttgatacattacaataaataaccaaagtatgagacaagttgtggattacagagaactctgaatatttgggaaacgctaaatatgtgtcggtgagctataaccttaagatgtgactggattagacatcttcaccacttattccatctctttatgaagctccttatgttttccccttgtatataataggttccaggtttgataaccatagggacactgtgaagactgaaatcatgtgtgtcctatcacttttaaggtagctctctctttaatttcacaagacaggcttgaaaaccagaagtaacccaactccaaaattggcagtaaatcctttgacagggaaaaggtgacgtactgtgtaataaattcctttgttgaaaaagagatgttgcaatactggaaactgaagtaccaaatgtttccttttaaatttggaaaggccctttcttattagttatctatccctgtggacttctaagaggggatgtgttgaaagatttttcagatgcccactagccacagtgagagtgaatggcagcatttataagatgacataaatacttcaaaatcatcagtaatccttggagacgtgtggtgtgccaggggtactgaatgtgagcttttgttgctgtcgagcctgtgcttttgtaggaggctgcctaggaatgtgggttgtgtctctgctgtgaatgcaacttcactttttcccctctggggctctttgtattagaattgaggtgggagtggtttagaagacaaaaagtctgcacagataagaaagatctgtgagattatgagttatattttaaaatcctaatcttattttgaggtcctgtggagcaattatattattgtcctcaaccattagaacactacattaataactggacacataaaggtcttttaattttcattttgtaataatggggctcatcccaccactgctgctactactacattagatgaagacaaaaaagattgaaaataatctagaaatgcaatgaagatatatcttacatgttagccaagaattggtaaattttgatgtttctctattcttattgcaaaagcttttcagtttgttacttttaccttttggaactaaaacttaatttgacaatatgattttgttgggctgtcacaatccctatatttaattatcttgttttaaaggctgcatctatcactggagctgaagttaaaaacaattataaatgtgtgatgaaggtcaggcaacataaaacacccatggcatctgttcatgttcactctgatcaactcgtgtactcaagatacagggaagtgaagtgaatggggccaaatcccatcatgggaaactttgctttcccctttactaacttgccttaagagaaagtattgtgaacgcaggagtgtaatcttaagtcgggcaataaacctgttggagaataaaaataggttttattttagatactggggaaaataaaaggaataaataagaaaagtcaagcatgatccacagtctctagataatcaagttaaaatgtttcctgccaggctaagagaaatctttaycatactatttgttttgttttgataatgataggtttacctaggtggtcatttttaccctatgtaaaggcttagcttgatttgaagcagtagccttcatttagaattacaaggcaaaggataaacttttaaattctattttaggctctctcagtgatgattgttaagctagctgagaatcactttaatagaaggaacatacagagaataggatgagaggcagcaaagtagtagaaaatttttcttaagatggttattttcatcatagtagtatttattaagtgcttactctatggtcaactccatgctaaatgctttatgtgatttttctcattttgtcctcaaaacaaccctgtgaggtagttggtatcccattccccattttacagctatgraaactgagccctaaataacccaaagtcaccctgctggattcaaacatgagtctcactgcagaacagatactaacccttaccctataggccttaaggtaggggtgtgtgtgtaagagggtgggaggggtgagggagggaaggaggagagaaaatgagaatgaatgaatagagtaaataaaatgtgcaagctgtcctcttcttaaaaaagaccctgcttcttgacacagaaatatcagatttctcctatgggtaaagttacagaagctttttgtaatgtaagctaatgtatccactagagaaataatggcattgttggaaggatttagatgacaggaaaataaagatactttattaattaactcttctagtttccttggggttttgccaactttttctggattccagacaaattcaaaaacagatgatttaaaggtggcttcactgaagtggtgtcacatgattgagggaagtggtcattctttagatggataaaaggtggttttaaaatatgcaggactccatttttcagacaatatgaagtattaaagtattttttttttattcaaatgaactaaaacgaaattctgtagttggaagtaattaaatatatcctgggtttcccccctaaaaaagtcagttaaaataaatattctcagatcaaatgatctttttcgtgtattgctgctaatggcatctgataaatatgtgtatatgagcttatcagaaattatgtttgaatcaacacagagttgcatgtttgaattggaaaaagtagctagaagtcgtcttctttcagtgtaaagttttctgagccattttcaatcaccagcaaagagccacgtatatagtttaagaatgcatttggtcccatatattcattgacagatgaatgaataaagaacatatggtatatacatacatagagtatccatttgggaatatgaaaaagttctggagctagrtggtgctgatggttgtacaacagtgtgaatgtacttaatgccactgaattgcatactttaaaaatggttaaatggtaattttatattatttatgataggaatggatgtagccttaaaaaagagaactgaattgcgttgctaaagcggcaggtttttaaatttaaacttaaattagaaaacctcgtgtaacagatgcctgggaagagactgggtctagtcgggctacctagcagtaccctttggttttcaggtctgtcctttccctcctgccgtcctcagcagatggtgttttctttcttttttcttttcttttctctttttttttaatttttcccactcagtggccatggatggtccttgatgctcatgcatgtcacccctcagtcatgctgctgtgcctcaggcttagctatgcaagtgcaggcatggaaagttggatttagtcagatatggcagagacattcaacttaatgctctctgaagatccatatattcccctatatttcacaggccccttgtagttgcctaagaatgtgtagctctttctggccagggaccggaatggtaatgatatttgtcactttcaggctaaggtggtaaaacagccttctggaacagcagggtggcctcgttcttgtggaggggaagtatgtgattcaggtagtgcatttacaggtgatggagtctccatctgcctaggtttgttcctttcacctaggtttgagtgagtgtgtgaagcagatcttcaggtgatgcaggtatgacctataacattagtgagaattatattttaagtcactgagatttggacgttgtttttgcagcccagtatagctattctgactgttactccagggtgggctkttgccaggcatgtttgatgaagtgagagcagcagggaggtttttgggagtaaggggatggatgtaagttgatgaagcatggaattttagttagttaagaatagaggtgaggacctgagtggggtgaggaatagttaaaaggcagcagaattaatggatggcagtttttggtgagatggagggaatgttggagttggagtgctcaagggagggagctggaaagataggaatgagatgattccaattgatgtgactgaggagttcacgttactgctgaaatgggtgtgagtttatcaggtagtgtggataactggaggagaggatatcagaatagcaaaagccaagatatcgggagaatcatctagataaatattaaattcagcaagaatgatgacaaggagtagtgttgggcagagtaaaagtgagctgggagttaaaatctctgagaaatgaatttgtcgttacatgtctgaaacggtctctattcaccctcactctagtagaatggtagtttaactgattccaggttggcagtgtttttttctgtttgcttgttttttttgccatagcatctttaagatattagtcttgyggcttcttttgttgcttggagatatttagttatcagtttaatttaaaaatttttgaatttttttgtaggtgaatttttttccttttctttttggtgagtttttaatattttcttgttgcctttggtccagagcttcaaactgttacaattaaggatggatttctatttttattcctcttttttggaactctgtggatcttcagtttaataacttaaattctagaaaattcttattccttatgcaaatattagtgctttcttctttctttcctctctttcaaaatgcctattaatgcattggacattatcattttacacttttggactcttaactcctcattttctttctctttatcattctaggctctgtttctttttcttattgtactacagtttgctctatttcagggataggcaaacaatgacctgtgggccaaatctggttcatggcctgtttttgtatagctcataagctaagaatgattttttagtttttaagacttgttkcaaaaaacattaagaagattttatagaaagaaattacatgtagcattcaaagcctaaaatatttactatttggccttttacaaatttgttttcaactgctgtccaattattttcacttcttgaaataatttttttgttttttgctattgctyattcttccttttggttgtatgtatatgtgtgttgaagttgggggttggaattttttattggtagttcatcttcagtgtgggttttgaaagtttcgggatacccacaagtagaagacatgtattatctttgagcatgggacatgctgaattctcagcaacaggaaacatactgggaaagagagagctggggytggagtaagggttaggattaatgtgagatgacctggccgtagagactggcactcctagggccgtgggaatgtccaggattcctgctgctgaatccagggtttttatatgaatccttgaggttggtgtgtagaatacacaatcagggcattgacatctggactggccagaatgacagttaagtgaatactgagtcatcaggcaggggcctgacactgttggggaggtctgacaatatgtagtagcacccctgccaactgctgtgtacgctgggcctaccacagagtagggactcaataacagcctggcaagtgaatgaatggggaaagaaatgaaggtcaggtccatattttgaggactggtaagtaccaggcaggtatcttctgccagcctttgtcctagactaaccagacaggaagaatatggagagatacctctaatagttgttttgtagatcctttgggattttctacrtagaaaattatatcatctgtgaatagagacagttttacttcttcctttctgttctttatgccttttttccccttgccttattacaatggctgaaatctccagtacattgttgaagagaagtgatgaaagcagacatcattgccctgtttctgatcctagggagaaacaattcagcgtttcatcattaagtatgatgcaactgtaggtctttttgcagatgttctttatttctggaaattgataactgaatttagaggcctaatcggattcaagtacagttttttttgggcagtggacaagactacgtcggtatgattttgtcaagagatacatagtgtctggtatctttctgtggtattagcagccactgatgattgcctctatcagttattacattgtgggttacaaatggttatattccaattctattaatttctttttcatttattatctgggatacttctgtagagaaaatattccttcataaattgttgggttactctggtatgtagtccctattggaaggacagaaacatgcttgcttgttttcttttatcaattttcagaatagtgagttggtttcatagcatcctccaaaggtgattagtgcttttaaaaacataagttatgaatttattatgtgttttaatccattcatttgtcatacttattgatgctaaatttttctttttttagaacttggtattttttacttctaggmatcttgtcaggtcttttataatccatgttttctgctaagatgtgagaacatacacatactcttacttggaaaagtaaggacaaaaagagggtatagtgaaagtcttattttttggtgaataaagagtggaactgtttgcctttgaatcacacttcagctctatggcagcatattctaagaaaccttggaattttgtaggtaagagcacataagtcaaactttctttgattggaacctacaggagaataagctttggtttcatggctctttgttaaagatgatcaatgtcagagagtataagtcataattttaaaagtttcttggtaaaaagatcaatcattggaaagctctgtatatatattcctgtataacagcagagcaaagtctttctgacatacattgtgtagttttcatgtaatgttaacttcatgtggtttagctttttgacttcaggcatgtgtatataaccttctgaacattcatttagtttataatatgccaattttctagcagttattattgtcctaaagtgtaacatttcactgttcaacatcaagtatgtacacaaagggaattaaactttatggcgtttcatgagctaagcacaatggttgttcttagtaagtgtccaacgtgatttctttctgttagctttattgtcatctttttcccgattataaaaacaatattgcaaaaatttactgaatagggaatgccacaaagttacacattgacttatgtatctagatcttccttgaagtgtaggtattcattcacaaagagatatttagatcctgaaggatgtttgcatttaygctttaccaaaaatacagggaagccatttctgggaaatatctggcaatttctaaaaaaaattcatccttttttttctcttttagaaggcctgtgtttatttttttactgaataggtgaacaactacttcagaattcccattcttctattgattctttttctttcctctcattttccagtcttgctgaataattttcttaaaacatccatttccaacactggagaggaatgtaatcttatttctaattgactrtttataatatgacatatttctaatctrctatgactaatgtaatagtcaaaggcagtgttttacctattcagcatatttgtttctggttgaagagggcatttttttccttgaaggtcctaatggctcctgttctttttattctattattttttattatactttaagttttgggatacatgtgcagaacgtgcagttttgttacataggtatacatgtgccatggtggtttgctccacccatcaacccatcacttacattaggtatttctcctaatactatccttccctttgccccccacctcctgacaggccctggtgtgtgatgttcccctccctgtgtccatgtgttctcattgttcaactcccacttatgagtgagaacatgcagtgcttagttttctgttcctgtgttagtttgctgagaatgatggtttccagcttcatccacgtccctgcaaaggacatgaactcatccgtttttatggctgcgtagtattccatggtgtatacatgctacattttctttctttcttttttttttttttttttgagaaatcttgttcttgtcccccaggcttgagtgcaatggctcgatctcagctcacagcaaactccgcctaccaggttcaaatgattctcttgcctctccctcccaagtagctgggattaaggcacctgccactacacctggctaatttttgtattttttagtagagatggggtttcaccatgttggccaggctggtctcaagctcctgacctcaggtgggtccacccacctcggcctcccaaagtgttgggattacaggcgtgagccactgtgcccggcctatgtgccacattttctttatccagtctgtcattgatggacgtttgggttggttccaagtctttgctattgtgaagagtgctgctagaaacatacgggtgcatgtgtctttatagtagaatgatttataatccttggaatatatacctagtaatgggattgctgggtcaaatggcattttcagttctagatccttgaggaatcaccagactatcttccataatggttgaactaatttacactcccaccaacagtgtacaagtgttcctgtttctccacatcctttccagcatctgttgtttcttgactttttaatgattgcatttctatctggtgtgagatggtatctcattgtggttttgatttgcatttctctgatgaccagtgatgataagcatttttgcatgtttgttggctgcataaatgtcttcttttgagaagtgttcttgcatatcctttgcccactttttgatggggytgtttgtttttttcttgtaaatttgtttgagttcattgkagattctggatattagccctttgtcagatgagtacattgcaaaaattttctcccattctataggttgcctgttcactctgatggtagtttcttttgctgtgcagaagctctttagtttaattagatcccatttgtcaattttggcttttgttgccattgcttttggtgttttagacatgaagtccttgcccatgcctatgtcctgaaaaattcacacttttatgaactgatggtatttgtggcaatgagtgtatattgaaaagtaccaatgtggtttaacaattacacataatattttttagggggattttttttgttagtgcctaacaccagtcaacacatactagttaaacagagaactacgtatcatattaatttgtattggtttgcttttgattgataaactttgtgtttagtttctgctgaatctctttactaaaattaccagattgctcatggaagtcatttcatccctcacggaattattttcccagctaactactctcttaaatgatgcataagggtgttctaatgctattgaaataagcagggtkttcggtgctgcttttyctcaactgttggtttctttggatttctaggatgtggagagcatcttgtgcgcaccatactggctagagaatgttcacatgctttacaagctgaggatgctcaccaagccctgttggagactatgcaaaacaagtttatcmgtaagtataacattaagargattacatcttctaaatatggattatttcacttctataagcactatgagtcaggtaytccatttgtatttctagacctacctctagggtctagcagaggaaaagamccrcagttaatactgattgtgaaaagaaattccaccacagtagatagtaccacatgaaatcttccatataactaagctaatccccaagctgtaagacactgacaaggctctcatatagtagaataaatacataaccatatgttaatatgttaataagaattgaccagtggcaaaatgtgtgctgagaaatgagtcatgaataggcatttaaggtctatctctagtgatttttcagaaaaaggttgattatattcatgtactatttcctcaaatgtattagaatcagacttaggttttattgttattttgttttaacaattactgttgttgaatgctgttttaaaagaaaaccaaattcatcggcttaatagcatatgtgatttacgtaattgttatgagttattagatgcattctcagaatgttaatgagaaggaatagtaagagtagaaaactagatgctcatcaaaagttcactacttagaaagatctctgtaactaaaactataaaacactgatgaaacaaaattgaagaggacaacaaaaaaatggaaaaatacttcatgtgtatggattggaagaatcaatattgttaaaatgtccatagtacccaaagcagtccaaagattcaatgcaatccctatcaaaatacaaatgacattcttctgaaatagaaaaaacaaccctaaaatttatgtggactcgcaaaagacccagaatagccaaagctrtcctaagcaaaaagaacaaaaatggaggaatcacattatataacttcagattatattatagtaaccaaaatggcatgggactggcataaaaacagacacatagaccaatggaacagagtatagaacccagaaacaaatccacacacctacaatgaactcaygttccacaaagttgtcaagaacatacgctctggaaaactctcttcaacaaatggtgctgggaaaactggatatccatatgcagaagaatgaaactagactcctgtctctcaccatatacaaaaatcaaatcaaaacagactaaagacttaaatctaagaccccaatctatgaaactactacaagaaagcactggggaaaatctctaggacattggtctgggaaaaatttcttgactaataccctgcaagtgcaggcaaccaaagcaaaaatggacagaagagattatatcaagttaaaaagcttctccatagcaaagggaacaacaaagtgaagagacaacccraagaatgggagaagatatttgcaaactatccatctgacaagggattaataaccagaatatataaggagcccaaacaaccctataggaaaaaatctaataatctgatcaaaaaatgggcaaaagatttgaacagacatttctcaaatgaagacataaaaattgcaaacaggcatatgaaaaagcgctcaacattattgcttatcagagaaatgcaaatcaaaactacaatgagatgttatctcaccccagttaaaatgacttatatccaaaagataggcaatagcaaactctggtgaagatgcagagaaaagagaatgctggtacactgttggtgggaatgtaaattagtacaaccactatggagaacagtttggaggttcctcaaaaatctaaaaatagagctaccatgtgatccagcaatcccactgctatgtatatccccaaaagaagggaagcagtatattgaagagatatttgcactcccatgtttgttgtggcagcgttcacaatagccaagatttggaagcaacctaagtgtccagcagatgaatgaataaagaaaacgtggcacatatacacaatggagtactatgcagacataaaaaagaatgagatcttgtcatttgcaacaacatggatggaactgggggagatcattatgttaagtgaaataagccaggcacagaaagacaaatatcacatgttctcacttatttgtaggatctaaaaatcaaaacaattgaactcatggaaggtagtggaggacttggcgggaggtggggatgcttaacaggtacaaaaaaataagaaagaatgaataagaccctactatttgatggcacaacagggtgactatggccaataataatttaattatacattttaaaataactaaaagagtgtaattggatcatctgaaacacaaaggacaaatgcttgagggatggataccctatagttgatggtgtgattatttcacattgcattcctgtatcaaaacatctcaggtacctcataaatacgtatacctactgtgtacccacaaaaattaaaagttaaaaaataaaaacattcactttctaggaaccctgtgatggatgtgtaattatggcacatggtaactttatggttgttgagaatgatcccaagtactttactgagtctaaaactacagattagctagttctacttccccaagtttgggtttatgctaaggagttcctgaactctgctcttttctgttgcttcgtataactctataaaactgttcacggagttgatctgcagtatttcatcttgccactgggatccattacctaatacatattgagccccatcttagaaattccagactcgtggaaaggagcaagaaatgtctgagctcacctaatggaccctgttcctttaatagctgaaacttagtttgcaagagttcagtgacttccaaaagtcatcttgttaaccagtgggtgtttgttgtgcaagaaaacactgccttttatttaaaaaataaaaaatgtaaaatggtatgaaatacagaagaacaatgttctgggagtcaagacagttgtttccactctcaactttgtgtccgtctcattggttaaacaagttgcttcagcagttttattaagaataaaagcaaaaatgctagataagaggcagtttctaaatgcttttgccatgctactgtctatgtcgtatcttctggattcagcacataaatgtgaaattcttttcaggcagataatttggaaatgggattgaaaaaggaaaattttcaggaactacttaggaagcacagatgatatttacaaggtaaatggaaggaaataaattgaattaccagaggactagactagaagcaaggaggttgagtttttttctcttttaacacactggtggtgtaattagttgtctgttttaggacaaatctctttattcttaatttcctcatatgtaaaaggagggggcaaatacggatggtttctaaaattccttccagctccaaaattatatttgatccttggtttagttcacaagccaaactaaactacttgtatgaagaatagttgtaggctgaatgccgtggcctgtaatcctagcacttcgggaggctgaggtgggtggatcacgtgaggtcacggagttcgagatcaacctggccaacatggtgaaaccttgtctctactaaaaatacaaatattagctgggcgtggtggccagcgcctgtaatcccagctacttgggaggctaaggcaggggaatctcttgaacttgggaggctgaggtaggagaatcgcttgaacatgggaggcagagattgcagtgagccaatattgtgctactgcactccagcctgggcaatagagcaaaaactctgtctcaaaaaaaaaaaaaaaagttgtaaatcaaattagccattaaatgaaattataaattaaaactattaatggtggatctcaagtttctatttgaaatgatttggttgaaatcctttcagccaatgatggaggtaagctagcaaccactttcttggttttgtggaaaccacaatattcttccctttttgcttcctttgttttttctttttaaaaaaatatttgtataaaatatctagtgattctcattacaatgcatgtgtagaaaaattgtatatgacaattaagttcaataaccccttttcattcattctgagtctcatttctcctgccagaaagaaccactgctaacagattggtatgtatatttatggctttccctcactcctttcctgccatcctcccttttctttctttcttccatcattttaaaaattatatagaagagatttttaatgtattgttttgcaatatgctttccacttaacatagcttaatgctcttaatatatcagtatatatagttttatagccaaatatttcatggttccataatttattcattcctctactgaaagagatttgtctgtaatttttgtctgtatcattttactgcatataagtgcttacttctctatattcttttaactaaacattttatatgatttcatttcctctcttttttagcatgtaagttattttttttagtggttgctctagagtttggaacatacatttacaattaacctaagttcacttttttttggtaaaaatttaaggggttcaagtgcagttttgctacatggatgtattgtgtagtggtgaagtctgggctttcagtgtaaccatcacctgaataatgtacattgtacccattacgtaatttctcatccctcattccctgactctcccacccttttgagtctccactgtctactattgtagactctatgtccatgtgtacacattatttagctcccatctataagtgagaacatttggtatttgacttcctgtttgtgagttatttcagttaagataatggcctccagctccatccatgttgcttcagaagacatgatttcattcttttttgtggctgaatagtattcgtgtgtgtgtgtgtgtgtgtgtgtgtgtatcatattttctttagtcatctgttgatggacacttcagttgattccatgtctttgctattgtgaatagtgctgtggtacacatacgagtgcagttttttgtgtaatgattttccttgagtggacacctattaggttggtgcaaaaataattgcggttccagactgtgaattttaaatcattataactaggctcaaccattattgcttatgggtctaataatttgtttttatgtatttttcctaaagtagctagtaacttactaaaataaagatttttttctcttactgcaatttgaaaaaactccgccaccatcttaagtgtagggtttgtttaaatctatttttgataaacaagactttaatgtgatagaccaaatggaggaaaattgaaaggcatttcagagattgaaatgtttttgtttccacttgcattaccttatgccaagatcagggctttggtttgacttaatattggaagcataaaagagaataaccagtctgcacatttctttgaaaaccactcttcatgtaacatacaaaactcataaaaatgggtactgtaaaaatagtgccttaataatacttcatgctaaccagctgattatagactgaatgcttagttaagtgggggaagaaataagtagtttcctttttagttgttctttttaaaagattacacacatatacacatataaaacctctttcagtgattcagatgtgacttttcctcttcatggttatttttaaaccaacttggttttgtgaattattctttttgatgcaaaccttggctgtatgtgtggtatgtgaactgtggggcagcattatagattcctgctcagtacttaacgactaatatcatggtacatttttttttagttggtttctgtttattactaaatataatgattgataaaatgttatctgtgaaaatgacttcttttttttctttgaatttctgaactaagctactagtcttataaacctacaatctttgtgactattgttggaaaattccatgtggaatatagtattacgattttaaaaagtgatttttgctctatattttacttcattcttttggggagatgttcttacactgtcattgacattagaggatcactgtcaattgtagagtgctgtcgacaattgagatggagtcccctcttatgcttttctgccaaatagagaagttatattcaattaatattttatgtgaacagtagctgtcataggaagaacaaaagtaccctgtaattacacatttagcctctgtgatcatcatttcatgaatttcttaatgatttagaatatttaaaaaatataatgttctcttttccagggcattgtgtttttataagactttgcttcatatttgataagcatatttctctttttcaaacactaaaatcttttttctttgtagccatctggagcttgagggattcctaagaaaatgtattcttttttgtctattagaaaaatcaaagatgtttctccttcactgttataaatgctgtgatatttagctggttatactcacatgtccaaactgcaaaataaggaaaatataaattaagcgtayctctttgggcaatatttgccactaattcttgggctctaggctttatattttcagaattttatttatctttttatttaacaattattcattgacagctatgcatatacaagatactttgctggttactatgagagattcacagataaataaaacagccttgctatcaaaaaaacttgcattccagcggaaaagaaaaaaacaaatgcacagtaaataaaatataaggtgaataagcactgtactaaagttcaggaaatataggaacttgcattctgggcaattttgtgaaatggagatcctggaatcttctgactacaaataatctaaaaatgctagacaaaatatttaaaaaggcaaaaatcacactttcaaatgaatggatgaaaatttttgtgtaaggtagtcctagatgtatgaaactcccaggagtttgggagaaataagtgaagatcctttctgaaggagtacrctgtcagctcagatctcaaagaaatctcatatatgaatctaaaatagaaggataaaataaagtaaaacacgtaaaagagagttaccatgagagagagcatgtaggtcaacagaaactttaaccagactaccaaagactttatttatttrtttgtttgtttatttatttatttgagatggagtttcactcctgttgcccaggctggagtacagtggcgtgatctcggcacactgcagtctccgcctcctggattcaagtgattctcctccctcagcctcccaagtagctgggattacaagtgtctgccaccttgcccagctaattttttgtatttttagtagagacggggtttcaccgtgttagtcaatatagttttttttgttttgttttgtttttgagatggagtcttgctctgtcacccaggctggagtgcaatggcatgatctcrgcacactgcagtctccgcctccagggttcaagtgattctcctgcctcagcctcccaagtagctgagattacaagcatccgccaccatgcccagctaattttttatatttttggtagagatgrggtttcaccatrttggccaggctggtctcaaactcctgacctcaggtgatcccccaacctcggcctcccaaagtgctgggattacaggcatgagccaccatgcctggcctaccaaagactttagatattagaattactagatagaaaatatgaaatgtgtgttttaaatattgatgtttttaaatagggacaatcattttggaaaaatattcattcatttcaattttcatgaaaagtggaacatgtgcctgcccaaaacccagaaactctggtcctgtatttctatgtatgtaccagatgacatgcacaagaatatctatagcacttattttaaatgatggaaagaactgtaatgtccaccaacagaataccatatggcagtaaaaatggatgccttgcaactgtacccatcagcatgaatgaaccttaaaatcatgatacttaagttagaaaatgcagtttgcaaaggaatgcagtcagtatgccaccattaagatatcttagcaaaatcaaacattaattatacatacatatatattaaaactataaaggagagaaagaagttattaagaagtaattcagggtagtagttttctctggaagggaggatttgggaagtctcaacaatgttggtagggattacttttccaagttgtttagtgaattaatggatgtttgttctatttatgtgtttgacaaattatgtgttacatatattctttttcaaacaaatcaagaaaaaaaaatcctatcaaaaagtagaccaagaacatgagtagacatttctccaaagaagatatactgccaacaaacatgaaaaaaatgctcaatatcactaatcattagggaaatgcaaattaaaaccacagtgagttaccaccctatgcctacaagaatgaccataatttaaaagtcaaaaaacaataaatgttggcatggatgtaatgtaaagagaacacttttacactgctggtagaaatgtgaatttgtgcaatcattatggaaaacagtatgaagattccttaaagatctaaaaatagatctaccatttgatccagcagtcccactactgagtagctacccaaaggaaatgaagtcattataagaaaaagacacatgcacatacaagtttataggagcacaatttataattgcaaacatatggaaccaaccttagtacccattgactaacgagtggataaagaaaatatggtatatacacaccatggaatactattcaaccataaaaaggaatgaaataatgtcttttacagaaacttggatggggctggaggccattattctaagtgaagtcactcaagaatagaaaaccaaatatcatatgttctcacttataagtgggagttaagctgtgaggacacaaaggcataagagtgatataatggactttgaggactcataggagaagattgggaggggagtgagggataaaagactacatattgggcacagtatataccgctcaggtgacaggttcactaaaatatcagaaataaccacttaaagaatgtattcatgtaactcaaaaccattgaaacccaaaaccattccaaaccccaaaactattgaaataaaaatatcaaaaccttaacagttaaaatccttttttatttttatttcttttcaagactgagtctccctctgtcatgcaggctggagtgcagtagcacgatcatagctccctgtaacttacaacccccctgggctctagcggtccttgcgcctcagcctcctaagtagctaggattacaggcacttaccaccacatccagctaaatttttaatttttctatggagacagggtctcactatgttgcccaggctgatcttgaactcctgggctccagtaatcctcctgcttttacctcccaaaatgctgggattacagttgtgagccaccatgcctggcccatagttaaactcttaatgtggtgaagtaggaaagggctgaagagttcaaaagaagcagaggaaggtgtcatatctggtagattaaggaaagagtcatgaatgaagtgtcttcaggagggaaaatcttggggtttgttttatgatcagcaagttatctaatttaagaggtagacagaatatagtcaagagaatggtataattacaactggaaaaacaaacaaacaaacaagcaatttttcttaatgtagtggacagccacataaggcttttggcaatagagtttttttaagatatattattattattatactttaagttctagggtacatgtgcacaatgtgcaggtttgttacatatgtatacatgtgccatgttggtttgctgcacccattaactcgtcatttacatgaggtatttctcctaatgctatccctcccccatccccccaccycacaacaggccccggtgtgtgatgttccacttcctgtgtccatgtgttctcattgttcagttcccacctatgagtgagaacatgcggtgtttggttttttgtccttgcaatagtttgctgagaatgatggtttccagcttcatccatgtcactacaaaggacatgaactcatccttttttatggctgcatagtattccatggtgtatatgtgccacattttcttaatccagtctatcattgatggatgtttgggttggttccaaatctttgctattgtgaatagtkctgaaataaacgtatrtgtgcatgtgtctttatagtagcatgtttctataatcctttggtttatatacccagtaatgggatggctgggtcaaatggtctttctagttctagatccttgaggaatcgccacactgtcttccacaatggttgaactaatttacactcccaccaacagtgtaaaagcgttcctatttctccacatcctctccaacaactgttgtttcctgactttttaatgatcgctgttctaactggtgtgagatggtatctcattgtggttttgatttgtatttctckgatgagcagtgatgatgagcattttttcatgtgtctgctggctgcataaacgtcttcttttgaaaagtgtctgttcatattctttgcccactttttgatggggttgtttgattttttcttgtaaatttgtttaagttctttgtagattctggatattagccctttgttagatggatagattgcaaaaattttctcccattctgtaggttgcctgttcactctgatggtagtttcttttgctgtgcagaagctctttagtcgaattagatcccatttgtcaattttggcttttgttgcgattgcttttggtgttttagtcatgaagtctttgcccacgcctatgtcctgaatggtattgcctaggttttcttctagggtttttatggtttcaggtctaacatttaagtctttaatccatctcaaattaatttttgtataaggtgtaaagaggggatccagtttcagctttctacataaggctagccagttttcccagcaccgtttattaaatagggaatcctttccccatttcttgtttttgtcaggtttgtcaaagatgagatggttgtagatgcatggtgttatttctgagtcccctgttctgttccgttggtcggtatatctgttttggcaccagtaccatgctgttttggttactgtagtatagtttgaagtcaggtagtgtgatgcctccagctttgttctttttgcttaggattgtcttggcaatgcaggctcttttttggttccatatgaactttaaaatagtcttttccaaatctgtgaagaaagtcattggtagcttgatggagatggcatctgtcatggcttcccttggctaggaaagggaaatcctctgaccccttgcgcttcctggatgaggcgatgccgcaccctgctttggctctccctccgtggtctgcacccactttctgagtagtcccaatgagatgaaccagkttcctcagttggaaatgcagaaatcatccgtctttgcatagatcacgctgggagctgcataccagagctgttcctgtttggccatcttggaacggasctatactcagtaaatacagttttattctaagatgtgggatggattggaggaaggagaccttggagatgaggtactaatttgtaggsagtggcaattagagaaatagaactagattggatagaaaggagggtcatgtactaaagactctcaaagagaatctctggggctttatagctgataaaatgtgacagatgtggggaaagaggcatttgaatagctggagtttagattctgaaggacatggaattacatgccaataagaaattataggaatgtcatatttgaaacattggacatgtagagagaatggcattggttttgaccatgttggtatagaggtatttgtagacatgatagtcagtagccgtatgtgggactagactttgagaggggagttgagaccttggggttgtcttccatgatttatggtacttccatatgcaggattcagctaaaaggccagatctgctcacatgtcattttctcaaagaagctttccctgtccaccctacctaaaattttactccttttcctgccctcctactctggtttatgtttctatttaacccttcttgatttattctgtatttacttgttattattgtttgtctcccttaagcagggcataaactctaggagagcagagattctgactattatttttaaccccattgctagaaaaagagtatcctttgaaggggatagaaaagagagaaagaatgagggaagagaaaaggacacttgtgatttggaagccagagatagaagggatcttgtttcataactgaaaggattgcaatgtatttacagttgtaaataaatatgcagaaaaagcttttggggttaggcattaagagggtacaagtcaactctgaagtttgtgtagtggcagggtgagaaaagaactctgttgagcggctgggagagagagaggatcagaaatgatgaagaaggggacaagttagatggtttagactccaaatcatcttgtcaataggtgactgatatccatcaactttgcttctaaaatgtgtacaagttagtacacaaatgtataccttgcatttttatcttcttttttgtttaactagagtacatcttacagagggtcacaaagttgcaaaataaatcatttttctttccttgtgacataagatacatatgtataattccagaacatttttaagtgtatagaagttttataaaatgtatagaatgcatttaagtgggtaggtggattgggaataaaaggaaaaagaaaagatgggaaatttctrtaaggatatcagtcacttagaaaatgaatgcggttttataagagccttcaagaatattcattaggaagctcatggtagaattgaatgccttttgcttgcccctttctggggtgttgttatggtgagctctgaaatacctctcagagtgcccccctctacccctttttaaattgaggcttaagaaataattcatttaaaacaagacgcagaaagcttgtagcttgtatcagaatgtcaggaggttgaagaataggaagagtgattagagagataatactcaatggcattattgaaggtaatagacatttgagacttttttcccttggatacaatggatgattaaaaatcacatttagaaaccaaagcaggcagatcatttgaggtcaggagttcgagaccagcctggccaacatgggaaaaccccgtctctactaaaaatacaagaattagccaggcatggtgtcaggtgcctatagttcctgctactcgggaggctgaggcaggagaacagcttgaacccaggaagcagaggttgcagtgagccaagatcatgccactgcattctagcctgggcaacagagcaagacactctctcaaaaaaaaaaaaaaaaaaaaaaaaaaaaaggacatttattgacctggacaactgtcatttgaaaataaatagttcgtctgtatgttatattgagttaacactaaatttgattttttcagtacatgttgattctgagaaacaaccatcacaatttccaaagaacccagaagttaaccttctttgacatggtggatgcatttttatcttgggatgatactgagtcagtgtgtgtgggaagttcaattatttttctcttcttcctttcttcttacaaataggaaaaagaaaaaaattttattactgcattaaattactaacagtattgatcagcagcagactaataagatggacttactggaatcagtggaaatgggtagctggcagcaagagaataacttcttggattttgggctctcaaaatggaagttggttttctccctgtggctgaggtttcctgtttgcaagaaagccttctagagcctggaagtttcatacattttgtacatttggagctttttaagtagcagagatgattgtatctaccacagatgtgttcttcacccaggcctttggggaaccaaaccaaaaagccatttaaaatagctactaaattttgataactggaaataatttggtaatattttttggttggaaagcaaataataagcatagtactaacaaaggcaaaacaaaaaaccaaactcccaaactctgtaaacaatcttgcgttacgttaaaaagagctattgttttgctactgatttatttgattttaaaaagtggccagtttgggggaccatggacttgattataaaggttagtgccatcccatcattgggagctgctgaactattcacaattggtattttattgagttttaaaagatgtttatgaagtattaggatgtaattaaaatcatacaaggaatttgtttcatctcatgcaaaaaaaaaaaacacacacacataaaaaaaccaaaaattcttgtctccatattagcaaattttttttctcctaagggtacttattaggtgatcaaaaagctttttgtctcttcctttagtttgtgagcatgtggggaaaaccactaatattagttacggtaaactcaaagcacataattataatgttgcaagaagcaaagggaaattaaatcatatgacactgaaggttgagttgcacagtatattgactaattagtctgaatagggcctaagctgcatttggtggattagatgaataaataaatccataattattataatgctcataacataatttaggatgatttttatagttgtgaagttgcttcccctcattataatctcactttttaaaacctaccagatatttgaaaataactatgacttttgagcctgtgaaaaccacacattcttgagagaagaatgaagtgtattaaacaatgttattcttaacattttatgaatgtgtaaaatccagtccattcattagcatcaacagggagcagcttatgtggcatacttctcaaatagtctatctgaggcataatgacattggtgattttctggtattttaccacacttctgagttgatttttagtttcaaattgggtaagctcagagtatctttgtttgttttaagtagcaagatttctagtcatttaaaccacttaaaatcaagtagcaggctttatttgaatttgtgattaggaattctgtaattgtatttgttaggaaaattttcagtgtgtttgctgtaaatgtgtgtatgtggttttgttttttgttttttgtttttgtttttgtttttgtttttgtttttttgagatggagttttacttttgttgctcaggctggaatgcaatggtgcaacctcgcctcactgaaccctccgcctcctgggttcaagcgattctcctgcctcagcctctggagtagctgggattacaggtgcccaccaccatgcctggctaactttgtatttttagtagacatgaagtttcaccatgttggccagactggtctcgaactcctgacctcagttgatctacccatcttggtctcccaaagtactaggattacagtcatgagccactgcacctggccgtgtgtatgtgtttttagggcacctttttttaaaaggtcaggtataatcctgtttgtcttccttcccttctttttcttgtaaaatatgtacaatgttccaaagaacttcttatattctgtaatatttagagacaaatatgcaaaacaaatgactatgttatcaatatagaagccaatatttaaagaatccaaccaaagtaccaattgactgacaactagtgctataggtaaaaattagctcctttggtcaaataattatgaagcaatgacactttaaacaaaataatttgggagtaattagctttttttttttttttaggaagacattttaaagatggttgaagaaattttaatagatggtagtttgaattactatttgtagtcttaggcatgataatattatagtggtttaggtaggagaatgtccttgttcaggtgatgtcttcatttaggatgaagggttgcaatatttgacagttacttgcgagtgccttaggaaaaaaaagtatttgtgtgtcgtgtgtgtgtgtgtgtgtgtgtgtgtgtgtgtgtattgtatgtgtgttaatttccatctctatatctatgaaagaactcaaatgtagcaaaatgttaatatgagaatctaggtgaagcatatataaatcttcattgtattactttttcagcttccctgatgatttgaaaccttaaaaagccataggaaaattgacttgaaaaagtagtatcaatgtttgttgaacattttttagttttcttttgaagtcatttttgtggcttaaaaaagcacagacaagtctgctttgcctacctcacaaagttaccattgatacaatgagattaggtttataaaaactgagaaaattctgtacacatgtgagctgccactgctgttcctcatgagatagtcatgtccacattttagtagtatgatgtcctgatttcagtctctgatgaagaataaggaagtggctttattattattattactatcttttaagatggagtcttgctttgtcgcccaggctggagtgcagtggtaccatcttagctcagtgcaacttccacctctagagttcaagcagttctcctgcctcagcctcccctgtggctgggattacaggcgcatgccaccacgcctggctaatgtatttttagtggtgacggggtttcactgtgttggctatcctggtcttgaactcgtgaccttgtgatcttcctgccttggcctcccaaagtgctgggattacaggcacaagccaccacgcccagccagaggtggctttttgattttaaagaggacttacataactggatttatgtaaggtgatcaaaactgaagtttactgattctttgcatgtttgctgtcatcaatgtcaaaataaaggcgtgcaagtcttattttgtgatatagctgctcaaaataagatttcacacgtttttgtgagtttttaatatatactttattagcttatttttcttccttatattaacctgaagaatattcagtgcaggtttccaatttgaaggtttttttttaattaaacttttaattttgacttaactgtagattcacatgcagttggaagaaataatatggagaaatctatataccagttacccagtttctcctaatgttaatgtcttgcagaattataatagaatgtcacaactaggctatatgatattgatacaacttgccaatgttactcagtttccccagctttacttgtagtttgtgtgtgtgcatgtgtgtatgtgtatttagttctatgcagttttatcatgtgtgagttcatgtattcaccacaagtcatgatacagaaccccttaatcatcacaagaatccctcaygttccccctttataaccacatcacctgactatcactcacccacccacccaccctgactttaatccctggcaaccaatagtctcctgtctctataattttgtcatttcaaaaatgttatatagatggaatcattcagtatgtgaccttttaggattgtctctttatactcagcaaaattcygtggagattcatccatgttttggtgtgtatcagtagttcatttctttttattactgagtggtattccctggtgtggacacaccataatttgttgaaccttttactcactgaagtacatctgggttgtttctatttttttagtattataaataaatttattttcagtattataaataaattaattactgtgagtgctagtgtacagatttttgtgttcgcatgagttttcatttcttgacaataaatgcccaaaagtatgtttgctgggtctttgggtgtttaaggaaccacagagttgttttccggagtcatattcccagtagcaaggtacgagtgattcagtttctccacatctttgctaggtttgtcactatttcttatttaactattctgatagatctgtaatgatactgtttttgttcctagtcatctgctttttaaaaaaattgtggtaaaatacacatggcatgaaatttaccattttaacctttttttttcctttcctttttttttttttttttttttgggagagagaaagggggtcttgctctgtcacctaggctggaatgcagtggcaccatcatggctcactacagctttgacctcctgggcttaagcgatcctcccaccccagcctcccaagtaacttggactacaggcatgagcagccatgcctggctacttttttatttattatttattttttagagatggaatctctctatattgccccggctggtcttgaattcctggcctcaagcaatcttcctgtctcggctttcccaagtgttgggattacaggcatgagtcactgtgagtgccttgctttaaccataagtgtacagttctgtagggttaagcatcttcacattcttgtgcagccaatcttcagactcttttcatgttgtaaaactgaacttctgtatccattaaacaactcccctttccctcctctctgcagctcctggcaactatcattctactttttatcctaatgaatttggctactctgggtacctcttgtaagtggaatcatgtagtatttgaccttttgcaactggcttatttcacttagaataatgtccttaaggttcatccaagttgtagcatgtgtcagaatttcattcctttttatttctaaatatcttattgcatgtatatacyacattttgtttatccattcatctgtcaatggacatttgggttgttccttatattagtgtgctggggctaccataacaaagtaccatagactgggtggctcaaacaacagaaatttatttcctcacagttaaggaggctagaagtccaagttcaagatgtcagcatgattggttgctaatgagatctctttctccttggcttgtagatgaccatcttatcccagagtcttctcatggtctttcctctgtgagttttctgtgtcctaatttcctcttgtaatgacacaagccatgttggattagagcccatcctaatgacctcatttaaccttaattaagcctttaaagactctgtctccaatacagctatattctgagatactggggattaggacttcaaaatatgcatttggggagcaggagatacaatttagcctgtggccgttgtgaataacacctttggctgttgtgaataatgctgcaattaatatgggtgtacaaatatctctttgagatttgctttcagttcttttgggtaaatatccagaaatggaattcctggattgtatggtaattctggttttggttttttgaggaactgctatactgttttccttagcagctgcacattttatattcccaacagtgccttcccatttctttacatcctcaccaatacttgttattttctgggttttttctttttttgatagtagccatcctaatgggtatgtgttggtatctctttgtggttttggtttgctttttgttattaattagtgacattaagcatcttttcatgtgcttattggccatttgtatatctttggagaagatgtgtatgaagtcctttgcccactttttgattagttctttgatttgttattgagttgtaaaagttctttgtatattctggatattaacctcttattagatatgtgatttacagatattttctgttattccatagatcatgtcctttgatgcacagaataactttttaattttaattttgatgtgatctaatttgcctgtttttttatttgttgcctgtgcttttggtgtcatatacaaaaagtcattgccaaatccaatgtcatgaagcttgccccctgtgttttcttataggagttttatagtttttactcttacatttagatctttgattcattatgagtttatttttgcatatgttgtaaagcaagggtccaacttaattcctttgcatgtggatatccacttttcctagcatcattatcgaaaaagactatcctttccccatcgaatggtcttgacacccgtcttgaaaaatcattaaacacatatgagtgtttatttctgggctctctattctattccatcgatctatatgtctgtctttatgccattaccatactcttttggttactgtggcatcatactaagttttgaaatcaggaagtgtgaagcctccaattttgttcttttttaggatagttttggttatttggggtctcctgagattccatgtaaatttttggatgggtgtttttatttctgccaaaattgccactgggaatttgatagagatggcattaaatctgtagatcattctgggtagtattgacatcttaacaatattaattgtactccataaacacaagatgcctttccattttttgtacctttaatttatttttaaaaatattttatagttttcagtgtacaagtgttttgcctttttggttaagtttatttacaagtattttattctttttaatgctattgtaaatggatttttccccttaatttccttttcaacttgttcattattagtatatagaaatcgagttcaaagttttaagaacaagcatgcattaatttccatttcagattgttcactgttagtatgtagaaattcaatttaaagttttgagaacaggaatgtataagctcaacatctcttgtgatgcctggaaaatctttaaaccaaaaatactggtcactgctgggtgtggggcaagaacttggcagatatgtgggaaaggcagctattcctttttaccatgcttaggaaaaaagggttcatgcccttcaaactactatcaaaatcaatgtgcatgccttattatacttcgcttttctttaacagtcaaaagccatgctgtcccatatagcagtcattagtcacatctggctatttaaatttaaattaactaaaattaaatacaattagaagttcagtttctcagttgtactagccacatttcaaatgctaaatagctgcatatgactacaggataatgaaatgtacaagtgcagtggcttttaaaatcttgagtgattcatttctctctttaaaagctacttatgtggcttaatcaaagacttaatttcactctttaaaaacctctctttggaagccacatatcatggattaaccagagagatttattttttttctcataataagatgtccagaggtcctatgtgccagctccacaatgtctctgatggtcctgcctccttgtgtcttattggctagaactgtgtcccatsatcccctctagttacagagacactgagaaacaatttcttagctggacacatgattgtctcctccacaaaatggggcttcttttcgatggaaagaatgaatsttgtataaacatctgctgtctgcctcaggggttggactagatgatccttgatctggacgactcttcctagctctggaagttgggaactttgtttaataaactctgggagaattggtgattaaggctttaatgctcatgtagtgaaataacctacactgggggttggcaaactatggcctgcaggttcaatcccacctaccaactgattttgtaaacaaaattttattaaaacatagctacactcacttgtttacatacagtccataactgctttcgtgctacaatggcagagttgagtagttgtgacatagaccatattgcctacaaagctgaaaattttactgcctggccctttatggaaaaagcttgccaattcctggcctagataatcctggagagcccttccatcggggtggctccaaaacatatattttcttattattcaataaggattcgtgcatacactatgtttcaggccaggcactagaaatacaacagtgaataataaaacaaagtctrtattgttatggaagttacattttatcaagtcaggcagacaataaataaataggtaaaacttagtctatcatatggtaataaaagctacagagaaaaatgaagtacaaaaggtggatagaaaatgcaggagagaagcttgcagtttttgagcatggtcagggtaagtttcccttagaaggtgacatttgagcagaaatccaaaggtgatggagagagccatgtggccagtggagggaagaacgtaccagacagagggaacagcatgtgcaaaggagttagcaatgtgtctagagttggctgagggatggcagggaggcctgtgtggctggagcagtgtgagcaaggggaaggatggttacggatgagctggaagaagtagtaagggccatgcaaggccttgcaagccatcataagatgggagccttgaagagttttgagaagataaattggcctgaattacattttattgaagccattctggcttgggtgctgacaatagattttgggaggcaagagtagaacctgacggactagataggaggctattaggctaattcagttaagagatagtagtggcttggaccagggtaatggaggtagatgggaaagtgattggattccggatagtttttgaaggtaaagctaacaggatttgctaattaattaatatagggtgaaagataaagagaagagtcacgatgacttgaggattttgggcctgggcaaagaagagaaatgaggtttctgtttactgatctaggaaagcctccaggaagaataagtcttgtggggaaagatcagcagtttcaaaagatgcttataaaatgaacaagtggaaatgttaattaggcaattgcatatataagtgtcaagttcagggataaggcctgagctaaaataaatttgagaatcaatggtgtgcagatgatattttaaagtgatacatgatatgagatcaggaaaatcgatgcagataaaagaagaccttgaagagctctggaacattccaaaggtaaagtaaagagataaagaggaaccagcaatgagattgaggaggagtggctggtgcttctggagaaaatccaggagtttgtgaagtcctgaaagtcaagtgaagtaagtgctagaaagcagcaaagcacgatcagcaggtcagactcttccgatgagcagtaagaggaggactggggaactgatcactgactagcaccctgtggtggtgatagatgacctttcacagtaggtttggatgragtggaggggatacaaatcccagtgtgagtgggtaagggaagagactgaggagataaataggaaacagtgagtacagacacatctttgaaggaatttttcctttcttgaagaagataatggggtggtagctggagaggaaagtgtttttttcttgtctatatagaagacaaatgtgtatgtttttctatagatgagaagttagagcaaataatacaggacaatgattcatgaaagagacaaattaatgatgtgtgtgttcgggcagaggtgaaggtccctgaggaggcaagaagcagtagacctagtcaacaggtgaagctattgaccttggaggagcatgagcaattcatctgtagtaacaggaggcaagtcttgaatcaagatgtggtgggggctgatgaaagttctttctgcttctgtctctcccagggaaagacagcagcagagttcccatggaggaggaaatattggaaatttgaggaaaaacaagaaagtataggtcagtacttgcctatgtattgccaggcagcattaagggtccaaattgaagatagtgaccatgaatttaaagaaggcatggtcagcatggtagtgtaattatcttcagcaaagtttggtttatgggtgcaggcatggagtaagatttaattatggttggaattttgtcaggtgagtatratggggcaagagcagaccaatttagctgatggtttctgcagagaattaattataatgatggactatggactttggctacttagggccaaaatgaggacttgggagggaggttgttggagtctgggaaccagaaggtatgcactgtgcagttaggggtggttagtgagattcttgcaagtgaggttcacgcaagaggtgatgttactgggaaatcacaaagactaggggacgataaagggagtgagtggstaacataaataaagtaagaggtaaaaaaattgagaagtcatggagttggaaggatagtctccatgcaccatgaagtcaactaggwattatgacaggacggatatcagccaggggcataaatctttgaggggtgatggagagtggcctctaggggccagtagatgaactgctacacaaacttgtctcatgacatgaaatcccaatctggttttagtagaagacactatccttsttcaggcatgacatgaatattgtttccataaacctcatttacatttgccaaaattttaaaccttatatagccttgtttgtcacaattagaatatgaaagaaaaatgcagagtgctctgaacccacatgtactaatgttgtatgttggcaagttgacctgcttgtccccagatcagttgttttttcgctgagctgtggcgttaactaacatgaacatgcaacaaccacagggcttaggagtcctgggatggagcccagctggatgggtcaagaaagtgaatgattcttttttttatttatcccagaaattgataattaagcttaactatgggccaggagtggtggctcatgcctgtaatctcagcactttgggaggctgaggcaggtggatcatccaagggtcaggagtttgagaccagcctggccaacatggtaaaaccccatctctactaaaaattagctgggcatggtggggggcacctgtaatcccagctactcgggaggctgaggcaggagaatcatttgaacccagaaggcagaggttgcagtgagccaagatcgtgccattgcattccagcctaggcaacaagagcgaaaccccatctaaaacaaacaaacaaacgaaaacaacaacaacaaaaactgtggaaattaaaaatttgaattactggcactctttttcttcctttagggtgttcaccatcaaaacaatactgttcactcaattgaatgtgtagaacttgctcttgttaacaaatggctctaaaataagtgtgcggttttgaaatatttcggattgaccattacttctaatgttgacctttttgtttacacactagattgaggttttgtgtaccactactgtcttgactatattttgtactctcagttaaggttttgtgtaccaccaatgactaggctatatttagtactcttttggtgacaatgcaataattgaaaacttacaaatgaaaacatctttcttgaaatttagatttttaaaaaaatgaatttcacagtgattcttcacttgatttttacactgtcaggcaattctgtgggtgtagggtctttttgtcctttagttattagccccttccgggatatagttccataacagaccctgcttatatggaatcactaaaattagtgtgwtaattcagtgtttactccagcttattaacatagctctattagattgtgaatgtctgtgtttctgcatatttggataaacttgttcttctgtaggtagagttcccagaattcttaagagtgacattgcagccttatcacagatgattaatgactatttaagaaactgtatacttcctgaatctaaaataaaagttgaaaaataaaataaaattaaaaagaaaaaaagcattaaaaagttgtgagtttatctatatgtgtatatacagaaaaacatctataaaatatttttcttcatgtaaatttaggttaatttaaatcctttaagtatactacaataaagttttgtggttttatttctttcttacaaaaattctataaagtaaaagttgtttttgagcataaagcattatttattgatttagacttccctaaagccatcctatcgtatatataccatcctgctttttacattttatttacctgaatgtttgggttttaaaataatgtatataatttataggatcccattttattttttattttttattatactttaagttctagggtacatgtgcataacrtgcaggtttgatacacaggtatacatgtgccatgttggtttgctgaacccatcaactcmtcatttacattaggtatttctcctaatgctatccctcccccagtcccccatcccccaacaggccccagtgtgtgatgttcactgccctgtgtccaagtgatctcattgttcagttcccacctatgagtgagaacatgcggtgtttggttttctgtccttgtgatagtttgctgagaatgatggtttccagcttcatccatgtccctgcaaaggacatgaactcataggatcccattttaaaacatttttccttcttgtatgttgtgaacaaaaagaaaagtctggcttgtgggttattctgaccatttttttcctagtaggtacttgcttttgtatttagttcttttctcattacaagctttttattttattttattattttatttttccttagagtgacttaagtttggctgtcatgtgcttgctcctgtataaattaagacaaaggtgactgacaaatcaatttggtctttcaatgccactgatgtcacgtgaagggactgcaaaaagttcatgaaaaatggaattaaaaatataaactttatttctcaacataagcttcagccagttaaagacacttttgcaagcagtgataccagccatttagtccattccgaaagatctgagggtcctgagtatataacagtgtcaatgcagtcttttttacatcattaattgaagaataattggcaccctttacaggtttttttctttaggatagcaaacaaaaagaaggagccaaatcaggactatatggtggagggctaatgattttccatcaaaactttcacaaaattgcccttgtttgatgagaggagtgagcaggatgttgttgtggtagaggactctctggtgaagtcttcctaggcatttttctgctaaagctttggctgatggtctcagaacactctcataataagcagatttatcattctttggccctccagaaagtcagcaagcaaaatgtctttagcatccccaaaaaactgttgccatgaccgttgctcttgactggtatgtttttgctctgatgggtttacttccatctctttgtagccattgctttgattgtgcyttgtcttctggatcctattagtaaagccatgtttcatctgctgttatagttctttgaagaagtgcttgaggatcttgatcccgcttgtttaaaattcccattgaaagctctgctcttgtctgcagctgatctggttgcaacacttttggcacctggygagtggagagtttgttcaacttaaattttttagtcagtattgtgtaagctgaagcaattgagatatctattgccttgtgaaaagtttatggggcaatgccccatgtaaatcagcggtttacaaatggataactcattttaagaagggatgagacagtgttgaagatgaaatgcacagcagcagaccagggtgttggttatggtttctgctgttaattgtcagtcctctgtaatcagggcatgaacaagacacatttttttccttgcaaattgatgtggatggtctgctgctgcaggcttcatcttcaacattgtctcgtctcttcttagaatgagtaatgcatttgtaaactgctgatttatttggggcattgtccccatgaacttttcataaagcatcagtgattccaccattctcccacccaaccttcaccataagtttgatgtttgttctttcttcaactttagtagaattgatgtcactatgagaggggctcttttcaaactgatgtcttatatttcttagtgcttcaaactagatctctttcagacatgttataacaagttagtgtgagtttattttcatgcaaacattttttgaaatccatgcatagtttcataatgcacagtttctatgaattttttgaagaccccctgtattaattctggcagagatatttttaccaatacaaatgaaggaaaggagttaataattttcagttacccttgctatcttattagccattttgtcagtgttaaattataagatttactctccaaaaatgttttttaaaaactttaaaagttaatggctctcatttttccctgtttttttaagaaggcatttattgtttgatcctgcagttccttatttttgttttatttattagacacagtaaaagattctccacagcccaaggctcctagacatgtgtagaatgtaaaaatatgcaattaaatcaaacaggtcagcttaaattccaccacaaagtgaagacttctggtgaagtcttcctaggcattttcagggctttatttagtaaaaaatgacaagctataaagtagatcctgcccagtgtcctaaggttaacaatttggagctctgctgaattaggatgatgggggcttccagggataaacaaggcctccagggactgacacaaggaaggaattcagagcctcagacttgggaaggaatttcacaggaaatggccttgctgtgcccagaattctctgacaactgtccttagggcactgcacttgatatcatgtaatgacaaggggacatataaataatctggttgaaatgacaggtcgaggttagtaaccacttgcgcacatttggctgtggtacgtgggccccctgatggggagcagtaactcacattctctcttcggtagagcacctggcttcagtcctcagtcatgtttcttcttgtcccacttctactctaagcagcatatgctatggcatatactaagtactgtggtgagggtttgctcattcagccatgctaggatacctccctgggacaggggaagggaggccatccaggggacatggaggtctctccagactcaccaaggaactctccctgaaactaccacagacgtttcctaagcagtcttcctgcctcttctcttgacaactatccccaccccatcattctccacagagcagcaagtttcaattcattctctaaagattttatttctgaagatataaattcactgtcttatccctttgatggccctccactgaaaagaggatgaaatgcagacactacttcatggtttccagtgtgattactgtctgtctcctcaacatcatcccaggtcactttcttgctcaggacactggcctccttgtttttttttttttccccctcaattcctaggttctttacttctcaggaccttggcatgttttattttcttcatctggaacatccttctttccaaccttcatcttcctcatcttttccaatcttccttcttcctcatcttttagtcagaattgaaataccacctgctctgaaagaccatgcagtggtgggttcctcttggccctatcagcctccctctcagccccttgtttgtttcctccgtgggactattactgttgtaaatgatgtgtatgtgtgtatttgcttgcttagccatttctgccatcagaatgtaaccttcctgtgacctgggaccatcagtatcttgtttactgatgtaatcccatcatctagaatggggttcagtatgtaatgaatagtacgtaataactagctaaagaataaatgaaggaaaattaatgatgctatccatgcactcttctaggtgatgagtcacctttttatgatctccctccctttcagtttaggctcttaaatcccaatgtaagtatatgccattcccaagtgggaagagaatgtttacaatgcgagtcttccaccatgagatctccaggtctagcagtgcttgcttgactttttgaaacacctaaaaatcatattggaattccattaaacagttaactccctgattaatgtgaccattgtgtcatcaacatgctaagtagatcctgaagacaataccactctcttgaacgtcttggccaccagttgctgtcttttatagcaattccctcatccattcttctcttttgccacaagatccctcaggtctgtttcttcccctgctgttccgatttcagtgagttcccctgtctgcaccatcagttccttgccattcctctctgatgtttccattttagtccatttgattttcttttcatgttgtttctcctcctccatagatctagtggtctctacattattgtcccttggacttccagactttgttcctgtcccttctcttcttggctcctttcrttaatcattagttccttgatttgacaaaactattccatgtctaaacccagttggctcttttcccagcactgcctgttagggacatcatctttccacatgtcctggtcacgcagccttcagcctttctctaggtccagatcatgtagtggatactaagtgtctgccatattctgagcactcttctttgtgacctttatcaatgttcacattgtccaaatagtcaagagctgtgactgattatctagtgtttgctcagcaccatgatgttgaaccaagttcaacccattatccaagggcggattttccttcttttctccatcctgaggcctttccctaataaagtgagtatgcccttctcagattccaatagctcaatagcttctcatttatttacttaagaaatatttgttgatcacctactatgtgtcagacactgttctgggtggtcagtggtgaacagatagtctagttgcctgtagattctagtgagatgtacatatttatagtatgtatggaatatgtatatatatgaatttgtatatataaaaatttaaaatattactatatgctgttttctagctttatataagtaaattgtgtctggccaacagagttgtaggtttttcaggaatttttttttttttttaatgtatgtgtatcacactgcttgggagagcattgagtacagagcaggtatttagtatgttcagcgagttcactaagaatggaatagaggcatacctcattttattatgcttagcagatactgcatttttcaaaacaaattgaagatctatggcaactctgcattgaacaaatctgttgatgccatttttccaacagtgtatgctcactttgtatttctatgtcacattttggtaattcttgcaatatctcaagcttttttattgttactgtatctgtgctgatagtctgtcatcagtgatctttgatgttactatggtaatgttttggggtgccacaaactgtggtcataaaagactgtaaacctgtgtgtaataaatgtgtatgctctgattcctccactaaccaattgttcccctgtttctcttgctgtccttggcctccttattcactgagacacaaaaatattgaaattaggccaattaatgactctgcatcttcaggtgaattgaagagttgcaaatctctcactttaagtcaaaagctagaaatgattaaggttagtgaggaaggcatgtcaaaagctgagatgggtcaaaaggtaagcctcctacaccagttagccaagttgtgaatgcaaaggaaaagttcttgaaggaaattaaaaagtgctactctagtgaacacacagatgataaggaagtgaaacagcttggtatggggatagaacatctgatataacactcagtgttaaggatcccaatccagagcaagatcctaactctctttaattctgttaaggctgagagaggtgaggaagctgcagaagaaaagttgaatctagcagagattcattcatgaggtataaggaaagaagctgcctccataatataaaaatgcaagaagaagcaacaagtccttatggagaagctgccacaagttatccagaagatctagctaagatcactgaagaaggtgactacactaaacaacagattttgaaggcagacaaaaatggccttctgttggaagatgatgccatctaggactttcatagctggccaggagaagtcagtgccttggcttctgagaacatgctgactctcttgttagaaactaatgcagctggtgattttcaattgaagccaatgcttatttatcattcaaaaaatcctatggcccttaggacttatgctaaatctactcttcctgtgccttataaatgggacaacaaagtctagatgacagcacatctgtttacagcacagtttactgaatactttaatcccactgttgagagctgctgctcaggaaaaaatattcctttcaaaatagttttgttctatgacaatgcacctggtcgtccaagggttctgatggagatgtacaaggagattaatgttttcatgcctgctaacataatatccatactgaaactctttattatttaaggaatacattttataaggctatagctgccatagatagtgattcttctgatgaaccggggacaagtaaattaaaaacctttagaaaaccttctccatcaggatttgttgcttttgaaatctgggtcaagtaaattaaaaaccttctagatgccattgggaacatttgtgattcatgggaagaggtcaaaataacattcacaagagtttggaagaagtatattctaaccctcattgatgactttgaggagtttaagacttcatcggaggaagtaactgtagacttggtagatatatcaagaaactagaattagaatggtgcctgaagatgtgactgaattgctgcaattttatgataaaactttaacggatgaggagttgcttctgtggatgagcaaagaaagtgatttcttgagatgaaatcttctcctggtgaagaagctgtgaacattgttgaaataaggacaaagaattaggatattgcataacttatttgataaagcaacttcaaggtttgagaggactgactttaattttgaaagctctactgtgagtaaaatgtgattaaacarcattgcatgctacaaagaaatctttcatgaaaggaagtcaattaatgcagcaaacttcattgccatcttattttaaggaattgtcacagccacctcagtcttcatgagccatcactctgatccaacagcagccttcaacatcgaggcaagaccgcccaccagcaaaaggatatgactcatctaagtctcagataatcattagcatttttgcaataaaagtacttttaaattaagttatttacattttttagacatagcactgctatacagttagtaaattatagtatagtagtgtaaacataactttcatatgcactgggaaaccaaaaaacttgcatgactcactttattgtgatttgccatttattgtgttatttgctctattgaagttgtttggaaatgaaccttcggtatcttcaaggtatgcctttatatagagaagtacattcaagtgagatgcaacaccctgtgtatcattgcactgatatgttgtacaattgaattatagctttctatgtaaaagtcctcctgcattaatgggtgactccctattatagggttcaggatacagtgattcactatatagggatatgtgacagtttcatctaaagttcacaatgtaaacattgcagtatttctagacctagagttgtaagttcacgtataacagtatgcatttataattatgtaactgtataacctctcagtacaatcatcaaagtgaaaaatattgaagaatccagaaacttaatagaaactggaatatcagcaatcaccattttatcaagcttcccacacagcagctgtgcaaagccattgttgtcacaataaaatagatttatttatttacttacttaaaaacaaagttaatgagagtacacaaagctacattaaactgattttacataggaattaaaagcgtgctagaaggcctctatgttatgtgcttctgcacagtaagtgggatctgaccacacaaagtaaaagtgaatagagttgctctcatggtaaaattgggtatataaggaaataaatcagagaaggaaacacaatgagcaacaataactaaatgtataatgttctttaaggtccgatgtcctttggaaggtcttcaggcagtgattggtggagacagtcccatgtaccccaagttgctcacctgcattatttggccatatcaactttgtttaccaagtccacataaaagataccagcatagtcctcctgaagcaaaaggcattgctcgggagcactggtgcctttggactatagtgtagataccataagatagttagcacacatagaatctagaatttaatgagcaaacactctattcacccagaaaaaaaagttttaatgctatacatgttttaaacactgtatcagtgaattcttccatatacacatgattaattgacctaaaaatataccaatcctgggtgtttttacctcactcgaagacaacttgccatctaacccctcttagaactaagggttttttttgtttgttggttggtttgttttgtgttcttttcgtcctgttttttgggagtaggctgagggttgctgagaattattttcttggagtattatggatggtgattatagcctgtggcaaataaaatagatagcagagtaagaactgactgtgaaaaaaatgttgcatttcctactatgtacatctcagaagacattctacaaagatacttatttgatcaaaggcataagcgatccttttaaattatgtacaagtctacttgcgtattttattttagggtaccacgccacgtttctttgtgtaagaatacacatgatcccagaattttggagtgacaaggctataattgactctgtctttaggctttcctgggaaaatattatcaggacattctgaccctaaagcaaaatcacagttaattaaattatgaccatatgaaaattctaattaaagtcaaggcaagagtatttgtcaagctgatgtttaagataatgtggaaaaatgatatgaaagcagcaaagaatattgtgaaaataaagccactcgaaatttatataggaataatttcatcaatggaacaggataatctaggtacagatgcaaatacatatgggaatttactatgtgattaaaaatgtatttcaagtcaatgggtaagagaggcctttttcaagaaatttatgttgggcaattggctgaccatttaggaatataaaacagcaacaagatcttcactgtagtctttataccaaaattaagtccagaagaactgaagttctaaaattaaaaattgtaattgtaaaagcacaaatagaaaacatggataagttattttcataatttttgattagggaagacctttcttgtaaaactgccaacacagaagccttagaagaaagagactacatattttgattacataagcattaaaaacttctgtattacaaaaaagatcatagacaaaattaacaaatatatgaccaactggggaaaaatatttgcaacacataatagccaagggcttactgccttaataagtaaagagtatagcaaattagtaagaaaaaaatacaagtacccaataaagatctggatgaaggaaattttcagtttgggattatgttgatatgacaaatccagacagaagggcttaacaaaatgagggcttttattttctcacataaaacatctgaaagcaatccagcctttcagcctggcacacaggcttcatagtgcatttggggcttagcctctttctgtttggctgtctttagtaggtggctttattcttcatgagaacaagatagytgttccactttcaggcacaaagtctgaagcagatggcagcagccaataaaatttgtgctagtgaagtctgccctttaataagctctgctagaaaactttgccacttagctaaccagccacaaaagagtttgggaagctaggcacttttctgccccaaacaaaattgggggttgccttactgtaaggaagatagggagaatggataatatgtaggcaaacagttgtgtatgccacagatgtgaaagcagctcacagataaagaaacacaaatggcttgtaaacatataggtaattaccttattcataaataaatacaaatcaagacagtagtgtgatactactatttttcatgtatcagattagtaataatcaaaaagtttgctaatacccagtttttgtaaggctggcatttccccatagggaaaataggtactctcaaacactgtttcttgtgggtataaatgtttttagaggaaagtttaggaatctgtagcaaataaatgagtatgctgattgattcatcaactctgtgtttagaaatatgtcctatagatatattcatacacgtgtgaaaggtaaatatgtccagatgttcactgtggcattacttgcaatggcaaaaaaccaaaattggtaacaatctaaatgtccatcaataggatactaaataaagaagtgataacatctatgtccargagcatattcattgttgaaaagtctaagctaaatttgtgtgtgctgagatggaggatctctgagttatattgttgaatttaaaaagtcagattgagaatagtttatatgacatgatctattgaatgaaaagttttaaaaatgcccagattacatatggataatttcagaaaggatatacaaagaactccgttttttctgataaaaactttttttcgtgactttattgataagaagaattttttttagggctaagtgacagtgaatatagggcattgaaaattgccttggtgtggcttttgcctacaaggaactcttgatggtacttacatctatagaataggccttggagtaagacagatactttcattttgtattattttgtggggtttttgttattattgttgttatttaaaacctacaggggtggtttttgtagtacatttcttagaagaacagtaatttaatgaaaatttactttttgtcatgggatagtcaagatagttaacaaccattaaggataccaactgttaacaatcagcggaataccaactagcccctccttttcttgatgtaaaatgatgaacatacctggtcattaggcctagtatctgtgttatataaattgtctgtggagatgtatttctttactacactggaaacatttttgtctcaagcctccagtacctatgttgtttgttctcttacttgctggagtttttctctaaattttagctttctcagagaggatgcttgaccatcctgattaaaatactgtctccctccatacctgtcatacaactgtgtctctcttatcctgcttgattttcccttctaacattgattgtttattgattatcatatcatagatgacttgagaccaccaattttaccttattcagtatgtacacattggttggtacagaactgattcttaaatattgtgaagtgaacttttataaaatatgaaatatttgttgaatgaatgttgtacttctcaaattcatggcttctagtttagtattaatatgcagatatgcatctataccaccctacctgctcccacaaaggacagtttgccttctgccactatctggctttattttgccctcttctactttgtgatactcctggagatggaggtctagcagctggaaacagggaggaaggtgttcactacattctcctgcatctaggggttggcagggtagtagattctgaaggcgaagaacttcttacctaaaagttaatcatggagaatgctggaactagggctgaaaacctaggccatttggcttcccctccactgagtcttcagttctctgtaggacattcccgcttgctcccttggtcagcagttcacctgtctcaactcatcactgttgctggatgatgggtttgtgggatcccaggtccctccacttgcagatagaatgctgggatggaatattcagaaaaagaagatgccttctgattcttcttagactgctttatgaatttcaaaatatgttgtttttttcttctcaactgaattatttccttgaggacagctccctgtgttaaactttttaaaagcaacaaagaaatctcttgtctcatttctagtacagtattaggtacatatatgattgattaaatcaagaagctgaggctttaattgaattmtcagtttggtttggtttattactgctaatctttgtggcagagtcagtaaatttatccgaagattgaatatctctcccatatgtatatgggattatagttttgattatggtttggaagtttggaattttctgttctgaaataaggtgactcttcctatcttttaaattttgttagataagggatttcaaaatggttattggccaaacttaactctgttttcaattcaactctcctctcctctttaaaagttaatttggagaccttaatattatgcttatcaccagaaaatggcacacagtgatgatacccataagctgggctggaggtggattcttcaggaacaggtagtcctctgggtttatagacagagacctggaccagtggttkaatgcccagctcccacttcttccttgtgtttctgtaggctcatttacctccatatgcctaaggttctttctttgtttcctttggtttctcttctataaagtgagtgtagtgaacatcattccattgggatttttgtaggagcagcaaatggtagaatgcagttaacttaatatacatcttataggacgatggagacaatcttgtagacttaagtgcatcttaagagaaaaagtccttgatcttccaggaagtataaattgttatcctactttggtatttaaataatatatttataatcttttgttctggagttaatgtatgtgttttcagtagagaatattcatcgtttccccagtattttctcgctcacctgacctccaaactgtctgtgtgtcaatatatttatttttctccatagatatgtaattcctcaaagagagaatggcattcaagtgatttggcgcataggaattaaaaagaaaaaagcaatgcacagaaattcattgaaaggacagaaattctttattaaatgtaatgggaaggtggaacactagcagctaccttctagctacagaatgcctctcttgataaattcccacatgttgaagaggaagctgtgtgtccggttttgcaaaaggaactctgatgttttggcttgtctagtgtcaggtaatgctggttgtgcttgtgggtagagatgaatctctaatactgaaaatactcctaacactatacatgcacatcagagactactagtccagtgtctaatttttcagatgaaggaaaaaaagcacggttcagagagatagagtgtcttgttcaagaatacagcaccaaatctggaactctgatttcctggttccttggctctttgttctgtccatttgtgtgttgtggacatctgtggatttgtttgtctaatcctaactctactccactggccttgtggttccagttgatcataccagggttaacccctttggtttttttcctcttagattttatgagctggcaaattcccctttctgctttagatttttctaattaggaatctgttactagcaaccaaaataatatgcattcaaattcttgttaactgctctgttttaatattcattgtggttctcctctcaaatttcttcagtgttttcgtccttaaagattatagcacaaatacaataagtgggtctgtaatttgtgtatagtctggatttacaacctaagtgaatgtccagattacatacatttaatcacagtgagtgtgtctcaccatctgtaattacagtttcattccatagcagttacagacttaggtatttaagggatctagttgagattattatagtgaataaagtttgatcttctttcttacttctttactaatccacttgttttttgcagctgcttgcacatatgttaatggaatttaagattgtcttaatttattaatttttgtccccagttccctctgtggatatagaaagcgcttaagcagtgccccacatgtcattccatgttaatttttctttctttttgttttctttactagtaagaggaataaataatgtttccttttatatagacacttcaacatttttagctagggaaattgataccctatcaccaccaccatctagtcagttgagcactggttccagctgttgtagaagattaactaggccagtatagtaatagatcttgttccacatgatagtctttgaaaaccagcaaaatgctgaagggtccttaccatcaatgttactgccaccaaatgtttaaatagcatcttagaagttaaaaagttcatacatacaaattcagtcctcacaacagccttcaaagatgtcttttaatatctgttatttataatgaaaaaactgaagagtgcaatttaaaaaattatatcttaataacacatagttgctatcccaagactaaaacatggttttctgtctgtgttagtgtttttccggcaccatggtgatcatataaaaatctgagtattttccacaaaaaatatggaatcttgaaatgcactctaaccatactttcattaaataattggatgaactcataccaaatgcaacactgatataagcttgcatggtagcctggggcccctgctctctttcatagcacttatgtaaaagtgccattctctctctgtctctgtttttttgtttgtttgtttgtttgtttttaaagacagagtcttgctctgttgcccaggctggagggcgggggcacgatatcggctcactgcaacctccacctccggggttcaagcaattctctgcctcagcttcctgagtagctgggattacagccacccaccaccatgccaggctaatttttgtatttttagtagagacagggtttcattatcttggccttcaagaccaagacggtcttgaactcctgacattgtgatccacccaccttggcctcccaaagtgctgggatcattctcttctttcttgccattctctttgccacacttcagtgatgtaggcaggagtatgtgtgtggtgtgtgtgtgtgtgtgtgtgtctgtgtctgtgtctgtgtgtctgtgtatgtgtgtgtgtggtggaattgttttgctaatcactagggggctttaaaggtaaatcaaatacctttaccccagaaagtctggatctgtataaaaggcactggagttaaagaacagactcagtttatggggggaaagggagccaggaaggacagttcacaacagtgggcccagggggaaatcttaggggagtggagtttgggaagtacaaatgatgtgtaaaataaacagggtgataagattgggaaggataagaaaggctacgccagactaaggaatttgggcatcattctacaggcagttgggagctattacaggtttttcagttgtttaatgatatggccatggctgggatgcatatctctttttacagtaaactttgaagtctctgtttcccatgcctctcatgtcccttccatcaacaactctattagttctacttgcagaatatattgcagacccagcttctgtagacagcctccactgtcacaaggctcacccaagccactgtcatctctcaactgggctgccacagcagcttctttagtggcttgttgcttttatgcttgccttgccactacattctgcacagctaagtaacttttacaagtccagataaatgttatcactgtctgtgacctggccctgcctctctcttgaaagcatgttctatcctctcttccctgaccctccctcacctcagagtctctgcatttgctgattgatctgcctggaatggtctttcctcagattatcacatggttagctccttaccaaaagaggccttcttgctctttaatgtagacaaggctcagccccagtgacactctccatcatttacctggttcattttcttcatagcacttactgctattgggtggatttccatattggtttgtgagtttaatacttgtcccccaagctgctcaactagatgtatgcaggggctttgttcacttctgtatccccaatgcctggaagagtcctggcacttagtacatttttattgaattaattaatttagcgatttgaatgactagagcaggaggccatattggagctagttgcagggtttcttggacaatgagaatacattgagggtcttgtcagtgggaatgaagggagggggcaggcaaaaatgaggtaatagggagaactaacagatttgacatggtttgaagtgttgacttgttggagagggaagaggtaaaggattttgagcttagatgagctataggagcccagaagaagtttctggatttggtggtaaaaggaacagttgtagaggtgccatgtttgagtactgctgggatggaggtttccagcacacagttgcattttgaggttattcagagatttttgtgttacctgagaggcattgctacaaatgaagcaaggatcatggcacagaagatgctgggggaagccatatttcctactcaactatagcatggctgtagcaagtcattgaacctctctgaaactcaggttcttcatctgtaaatgataataaaatgtctcatggcaggtggttctgaaaattaaacttctctcagtgtattatatttctccctctttttttttttttagcttatcagtatgagagtttatatttgtttactctagctattcacatcctaactacatagtatactgtgattccatttcatttcttgtacaagtcttattatttttttggtaatagtcactctttcatctccaaactttcctcaaaatctgaaacattttctctcartaatttcaaaccaacatgtattcagtcagtttatttttccctccccttagaattacctttcctggcctcttctggcttcatgctccaatttggacagtttgctctctcagcttgrtgcatagctgtgtcatctggaatcccattatcttctcttgttttggatcctctgtatccagatcttattttcttcctcattatttacctcccttcttcattctgtcaaggaacattcatcctgtagctttctgagaaagaatgcatgggaggtaatctctttgagactttgtagagctttattccactttcatactttattgaccttttggctgaatatagaattctaggttggaaataatttttcctcagcattttgaagatagtgcctcatcatcttttagcttcaggtgttgctgttgttgagaaatctgatgccactgtaataccattgctttccatgtgatcttttcttcccatttgaaagtttttagacccttctctcctttcttagtattttaatatttcatagtgttaaatcttcgtggggcccctttttcatgagttgtacggggaggttgatggaccttttcagtttgaacactcatcttcaattcttggaaatgtttttgaattatttctttgaaattttactccttttattttttctagtctctctttctaaaactcctgttattcacatattggataattctggcctagctttatgattttcttatatttttgactcatttttcatctttttaatttttttgttsttgttttgttttacttttcttctgctcaggacacttgcccaaattttccctgtgttactcttttgtttcttttttcttttttaattatactttaagttttagggtacatgtgcacaacatgcaggttagttacatatgtatacaygtgccatgttggtgtgctacacccagtaactcgtcacttaacactaggtatatctccaaatgctatccctccccactcccccgaccccacaacaggccccggtgtgtgatgttccccttcctgtgtccatgtgttctcattgttcaattcccatctatgagtgagaacatgtggtgtttggttttttgtccttgcgatagtttgctgagaatgatggtttccagctttatccatgtccctgcaaaggacatgaactcatccttttttatggctgcatagtattccatggtgtatatgtgccacattttcttaatccagtctatcattgatggacatttgggttggttccaagtctttgctattgtgaatagtgctgcagtaaacatacgtgtgcatgtgtctttatagcagcatgatctataatcctttgggtgtatacccagtaatgggctggctgggtcaaatggtgtttctagttctagatccctgaggaatcgccacactgacttccacaatggttgaactagtttacagtcccaccaacagtgtaaaagtsttcctatttctccacatcccctccagcaccagtcgtttcctaactttttaatgatcgccattctaactgatrtgagatggtgtctcattgtggttttgatatgcatttctctaatggccagtgatgatgagcattttttcatgtgtcttttggctgcataaatgtcttcttttgagaagtgtctgttcatatcctttgcccactttttgatggggttgtttgtttttttcttgtaaatttgtttgagttcattgtagattctggatattcgccctttgtcagatgagtagattgcaaaaattttctcccattctataggttgcctgttcactctgatggtggtttcttttgctgtgcagaagctctttagattaattagatcccatttgtcaattttggcttttgttgccattgcttttggtgttttagacataaagtccttgcccatggctatgtcctgaatggtattgcctaggttttcttctagggtttttatggttttaggtctaacatttaagtctttaatccatcttgaattaatttttgtataaggtataaggaagggatccagtttcagctttctacatatggctagccagttttcccagcaccatttattaaatagggaatcatttccccatttcttgtttttgtcagrtttgtcaaagatcagatggttgtasatatgtggcattatttctgagggctctgttctgttccattggtctatatctctgttttggtaccagtaccatgctgttttgattactgtagccttgtagtatagtttgaagtcaggtagcgtgatgcctccagctttgttcttttggcttaggattgacttggcaatgcgggctcctttttggttccatatgaactttaaagtagttttttccaattctgtaaagaaagtcattggtagcttgatggggatggcattgaatctataaattaccttgggcattgaatctataaattaggattgacttggcaatgcgggctcctttttggttccatatgaactttaaagtagttttttccaattctgtgaagaaagtcattggtagcttgatggggatggcattgaatctataaattaccttgggcagtatggccattttcatgatattgattcttcctacccatgagcgtggartgttcttccatttgtttgtatcctcttttatgtcattgagcagtggtttgtagttctccttgaagaggtccttcacgtcccttgtaagttgtattcctaggtattttattctctctgaagcaattgtgaatgggagttcactcatgatttggctctctgtttgtctgttattggtgtataagaatgcttgtgatttttgcacattgattttgtatcctgagactttgctgaaattgtctatcagcttaaggagattttgggctgagacaatggggttttctagatgtacaatcatgtcatctgcaaacagggacaatttgatttcctcttttcgtaattgaataccctttatttccttctcctgcctgattgccctggccagaacttccaacactatgttgaatagaagtggtgagagagggcatccctgtcttgtgccagttttcaaagggaatgcttccagtttttgcccattcagtacaatattggctgtggatttgtcatagatagctcttattattttgagatacgtcccatcaatacctaatttattgagagtttttagcatgaagcgttgttgaattttgtcaaaggccttttctgcatctattgagataatcatgtggtttttgtcattggttctgtttatatgctggactatgtttattgattttcgtatgttgaaccagccttgcatcccagggatgaagcccacttgatcatggtggataagctttttgatgtgctgctggattcggtttgccagtattttattgaggatttttgcatcgatgttcatcagggatattggtctaaaattctctttttttgttgtgtctctgccaggctttggtatcaggatgatgctgtactattttatttcttttggtctctgtctttcctaaaacagaggcctaactaaaacaactaataatcctagattgtctgtactctttaatagttaaataccaactgtttggtattaactatttaatagttaaacgcyaagccgaactaaaaacctttagtgtatgagtcatacttgtcatcttgaagctcttaccctaagtcgaggacacgttktcttgggggtgtctctcaagtaggtcgttagtcttgagttggctgcgttgctggaaagggrttatccagtctcttcttggaggatatcagcttgatttcttgcatcctgggagctggttatttcactgtttagcataaagacttacacctcagctccctgttttcagtgtgtagcctctttcctgccctgggctaaccctgatgctcccaagtctcaactctctagttcaccttctttagagagtaaatatcctggcttcttcagcgttagggaggagtcacttcctttttggaaaggaattgcagttctgatctcctgttctagatcaggagttggcaaagtttttctgtaaagagctagagaataaagattatgggcttgcagcctgtgtcacggtctctgtggcatgttgtcttccttctcttcctcctcctcctttttttttttttaaaacaaccctttaaaaactaaaaacaaaacaaaataatggcattcttagcaggacaacctctggtctagaggattcttttggacactgtcaacctaccatcttttatcctctctaccctgtacccctgccttcagaggatcttgaagcctacaatttctgaacctttttgcattttacagcaaaactggtttggtttcctgtgggtatcctccactccagttttcccctgcctcatgaaaacttaggtttcagctttcatgggtttgctaggtgagcaaccacttgtctgtcttcttaccgttttccaaaaggtcagttttttccttgtctgcctctttctctgcccttattgggctatggcttctttcttcctttcccatcagttcactaggatttggagagggagggagaaaaatacatgtatttartatagtaagtttaascagaagctcccaccaaatccaatttgattggttttgattttttactactctctttgatagttcttgggttaattttgcatttattttccacgtgctcacttgctatgccagatgtttgaagaagatgtccttgggcaagaaaaatgaggggttttaaaatataatgttcttgaaatgttcacaatggttcagtgtgtgagatctcaaggaagcccaactctttctaaccaccagactctcatcatagaaatgcagtttcacccttatttgtgcgaaccatcagaagcatttaaaaatgtttataataaagtttgtggcttattgtttcaaattgcatttaaggtagtaaactgaagcttttggtggtgtgtccctgacagcagggagagcctgtggtaagtgatccctaagagttgatcaaagggagtcattgagcattttttcctgtatttgtgttttggtcctttaatctggtagcatttccaattccattctgaatacagtaatgcacattccctcccccacttacatcttcttgacagcatgtggcattttctttgccaaatggcccctattcaggcataaacctgcctttgccatcaagtatataatgaggtatgaacaatggtgattatcagaaaatgggcattttcttattcatgccacatttttgttctaataatcaaatgaaaattgaaaatttaaaaagtaaaattcactgaaaaataactactagtcctttctgcctaggttcacctttccttgccagtgaagatggcgtgcttggcggagtgattgtcctccgttcatgcagatgttctgccgagcctgactcctcccaaaataagcagacacttctaggtaagtgagacatatacattgtgtgtgtctttctatttttttttccaagaaaaaatgaaaatatttatacccttaagtcaataattttaaactgcgggagggtcagcatgctttattgatatctgaacatccctgttctactgatctttttccgtagataagcatgtaaaagatgaatgttcatttttaagtatacacttagagaatatatttcaaataagcttagaaccaaggacctttactaaagtccagtattaagaatgttggaccctgtattcatgtcctatcttattccacaaagcatttgaggtgacccataacaaggcacacagtaatagagaggcttcttcctgttccccttccccaaaaggaatgagaagcatgtgaagagctactggccttagaggtcagtcctggctccgtggctcgttaaccatgacaccttcgtgcattggtcttgctgttccatgctacttcctcatctgtaaaacaaggacatctgccctggcctcctgataaagctgtggtgagggagggtcaaatgagtattttcgcagatttgcagatttccatccagatgtgtggttttgtttctacccaagcaccagtggggatgaaacccagcccaccctctgtgaaggcacagagttgtggggctgccgctgaccacagggttgcctttttctaatccatctctccagaggggacacattaaaaaaatctgcataaaggtgacacatgcactagcaggggcactatttgttatttttttaaagttaactttttaactgaagcatacatacatttagaaaagtctacaaatcataactgcaactgcttgatgaattatcacaaagtgaacccaccccctataaccagcatgcagattaaaaaaaaaatagaactttgccacaaccccagaagtccccttttgacaccttctggtctttatcccctccaaagttaaacagtatgctcacttttaacaccatggttagttctgcctggttttatktattatataaatagaatcaggaatacgtatcacttgtgtctaatcttcagtcagcattcaagcttgttagattcaacaatgttacatgcagtaggagtttgtacattttcattgctgtgttatattctactgtatggtgatagctcagtgtattagtccattcttctgtttttttttttttttttttaatacaaacactataggtcatccacgggggttgtggtagtttaacccttcctataaatttccttacagaaagcgtgagtggtgcctgatgtatattgtgtgattgttgtcgattgctatagtacacgtcccttcatagtttataaaatagaagactgtgtgttttttatgggtataaaaaatactttttctataggtgcccaaaacattttcataaaatctctttgttcattcctcagagaaaaactacactttatataaaaggcctttttctccacctggacactaaccaccagctgtatttttttttttttttttttttgccatactgtctccttctaccctctgcacatagtacctaggttcctccaaggagatgtgctttttaacagtcatgttttgttaaaccaagacaaatactagttttcttctttggtgtcttaatcgttgttgaatcctttgaatattcttccagttagatagttaaacccaacctggttggttttaaacataagcagaggatggacatggggtttacataaaacctttgcagggacatggatgaagctggaaaccatcattctcagcaaacttaacacaggaacagaaaaccaaacaccacatgttctcactcataactgggagtttaacagtgagaacacatcgacacagagaggggaacatcacacaccagagcttgtcagggggtgcggggctaggtgacggatagcattaggagaaatacttartgtagatgacaggttgatgggtgtagcaagccctccatggcacgtgtatacctatgtaacagacctgcacgttctgcacatgtatcccagaacttaaagtatagtaaaacaaacaaacaaaaaacctcagaagaataacccctagtgtttgggcagcggtgggttggggggggcattaaaattgtttcatcgattattcctaaaaaggagtatcacagtactttgctgagcctggactcttacccatttgtgttaaccctgaaaactgtaatgtctttttggttgtcttttcatttttggtggtacagaaatgcatatttaaggataagtcatagtattttagctcacgttatatagtttttattaccaatgtagtgatttataaactggttcctactctttatttcaagaggaagcattaagtgtgaagtgccagtttatgaaataagtgaaaccttgccgttcattaactggaggcgttgatgcttatgaagcttatctactaaaacctggcgaacataggctaatgtcaacttatagatgctaccaattatgtgaactttctataaaagttaygaatgtgaagtatttggtaagaaaataaattcaaacagtatagaaggataggaaacaaagtaaattcaaacagtatagaaggacaggaatcaaagatgtgaaagtcaccttttacactccatttccagagccaccagtcagtctttggttctggttattctcacgggaaacaccctcactctgtagaatgtgctcacacatctatttcttgattagtcagtaacttgtgaccccttgctgtgaaaaagttaaaaacttagctcacaccatgtcccacttcccttccttcttgatttttgttggaattctactctaacttgaaataatatgtttaattttattgtattttancacactgtttcttgatatattaactttatataatgtctatcaaacattcctcaccacttcaactatataagttgaggaaagttcatgcactgttttctgttagtctgtttctattgcttataacagaatacctaaaactaacagaatatmtgagtagtttgtaaagaaaattaatttatttcttacagtcatggaggcttagaagtccaaggccaaggggctgcatgtgatgagggccttcttgctggcggggactatctgtagagtcccataggggcacactgatgtcacatggtgagggggctaagtgtgctagctcaggtctctcttcatcttcttataaaaccaccagttccactcccatgataacccattaatctatgaagatattaatccattcatgagggcagagtccttaagacctaatcacctcttcagggtcccacatcttaatactgccgtattggggaataggtttcaacatggattttggaggaaacaaacattcagaccctatagcattcgcttttctccttttctcttcctccttcactctcctacctcacctcaacctctgtcaacaataccattgttgttatgattattaacatttgccttcttatatctgtacttatctctatagtttgatcagggattgattctaaataatgtcagtaaccagcattaacagcatcaagattatagtataaatagtgctcactgcataccctagaagcagaagattggacccataaagatcagggtttgtcataaacctctgcctgtaaaaggggactatttcagtcatcaagatcaagtggattctcctttctatcagttgctccaaatcaggctataaattaatttgcttcgtgtttggaccatgacttcccatgactttatgactttttcactgtcataagagtataactataaactcatggcttctggagctcagtaatttctagtaacgaggaaagctcagaagtctttcttttctacacatccaaataaaacaatttccaaaattaaaaaaaaaaacttaactgctgtgtattgttaatcacttttttggtcccaagaataatataatcacacaatctcctactgtagccttttctgtgtccactttcttttctcaaaattgtaaataatgttctcattacaccacacaagcagttttcagtcgaacctcattgccacttgatggagtttcctggaagccgttatgtagactttcctcttgacaaatacattagttatcagagctccagtgggctgcttccaaggtgatatgactcaagtaacagacacttttgaggtttgccctttgtctactgattcatgaatagaatcggagaatctcaggtatgaaggaactttcaaagtccacttgtgtgaccttgttacaggtgctttgtccatagtttgttgaatgctcctcccttcaaraggtggaactcaatttccctgcccttgactgtgagccaaacactagagactcrcttccaaccaataaatttatggcagaagtgaaagtgtcngatttctgagactaggtcaaaaaggcattgtggcttcctccttgggctctctgttgaatcactccctctgggtgagaccaactgccatgtcatgaggacactcaagcagcactgtggggaagcccacttcgcaaaaaactgcgacttcctcccaacagctgcttctgaggaaccggggcttcctgccaacggcctcagagatctgagtgagccttcaggtgacagcagtctatggcaacatcttgactgaaatctcatcggagascctgctaaagaaccacccaatgaagccaccgtggaatttctgacccacagaaactgagataataagtgtttgctgtcttaaaccaccgcattttgagagaatttattacgtagcagtagataactaataaactttttaagccctttcgtctaatgagctgtaatgacaaatcaagatgctctgttgccatctttaggcagctgttgggttttggttttcatcagtagatcctgattctctttttggggaccctctaggacaaatatgatgcgtgtccttttacattgcagtctgtaatcaagtttccctcacctccttagcctcctcacctccagcctttcttcctctatttgtcccctcagtcccgtctccattattgctcccagagttctttctatataacaactctgcagctggcccagagaacatagccatgggtcccaaaccaggggcaggagagaagacttcccgaaagaagaaagggcaaaaatgagaacctgacctagagagccacaccaatcccaagatcagaaggacactgttcaacccaagagtgacataagtatatgtaattagtttactatacgtctaagctaaatgttgaatcttcttatgtatactaaaataaaaacaaacatgtatctcttactgttacttcaatgctctctacctttaatttttcagcaggcagcacacacacagacaggcacacacacagacagacacacacacacacacacactcacacacaccctgtgctggtgaatttcctatagcacaaatgggagctacctaacttgatgggaaatggcatcccctgatctgacctcagaatatgctttcagtgttatttctgactagtcctttttaaaaaaaaaaaataattgacaaataatcgtaataattgtatatgttcatggagttcaactagtttttctcttcattcattctcaatgtctcaactctggccactccacatcacttggtcttccaaagagttatttttttcccgcaataacttgcatatgctcttgctgtgctaagctctgggccaatacaagtctttaaaaccctgatcaaatgtgaatcttcttcgaatcctctggaagtcctcaccccaggtaatttgctctttccttgtgctctgttagcaccatgcagttgacattccttctaacaatgactgtgacacatcctagccccttctcataggccagcacttcttaatcttttttctgaactcagttatttgagaggaataaatcataggtctttgagctccagtgacacacacaggggctatagaggtttgaaatatctttccaggcrctggaaaattccactgcttctaagaatcataccaccagattgtgaactatttgagggcagaagccatgtcatattgaacttaataggttcccaataattattggatggatgatttaggtgccaaatggagtttctttattgatgatttagcagaaactttaaaagaagttgaytcttgttccagaaaaatgaaatatcacagaaaatattctcatgctcacaaaaaaacaaacaatattggttggaaatgttggataatgaggagcatccaagaactagatgattttgaggcagtttaaagggatcacagaggaaagtctctgcaaatagccttgtaaagggacaatttggatgtgaacatgtttgcaacacccatcctgccacctcctacccccagatcatgagatgctgacaaagcccagcctacaaatcgctgatttaacrcaaagcaaatgcttgtccctggaatgaaacagctgaaaagaattaattttctctctgcttttagagaaaaaataagccaatgtatttttacctgctgaagtacaattacatgtgctttccaggcctctacagaagtgctttattgaggctgccgtatatagtatggttaataaatggataaacaaaggcaggcataccaaaccaagtcttctggtgaaaaaaatgagttctttaccattttaagcttgtaattagatacaggtaattagaatatatgcaaatatatagcataaacagccaagcttagtatatgggttaatttcctgttttgcaccttgtaccaaaacatgtgttgttgggagcctgatagaccctatgaagttcaagggtgtctgccagggagtggtcagtaggaagcagtgaatgtggcgatcaatgaaaaacagattccatatagaaaaatcttaagcaattcaggataggaggcatatgggctcttagaagtaaaaagaggctgtgtgtttaaccagtggcttttgtgccaagcttgtgttggagttcttcatcctaaacagatttgaggcccacagttcatccagagcctgattatgcgatgagcacacatgtaattgttaccttgccattaagttaaccccaccttatgcagagaataacttcagattctttcctatcaacagatgtgttcataatgctgataattaacttttgtacatgatcctgcttccatttgtccagctacccttttatcctttttttcatcttttactatgaaatgtttaatatatttttaaaagaaggacataataaatttgtaagttataaaggacaataataaaatgaacacctgtggacctgccaccaagcctaagaaattgcccattacccatatgtttgaagcccctatgtgggcctctctgatcttactactgtgctttctccctcctttactttgtgtttaccccctgcttttcctgaaagctttttcacacttttatatgtctctaaatggtacattgtttagttttccttgattttaaactttatataaatggtatatgatttattatatgaaaatttccgcatgttctcacataattacctgaaaggataatgagttattttatcattgtagacatagctctatcaaatcaaactgttttactgtggccaattagaactcaaatgcagtattttcctccctcttttcagaataggcaaagttctttatcgagtactttgttttgttgcygttaccaaagtatgctgtggtttcaaaataaaaaatgttaaattgaattgatgcttcctggaacattaaaaagataaaaggttattttactgtaagttaaaattccaaaccgccttttggttttactggtattaaaaatttggcgagcacatayaaacacatgtacttcaaaggagcttcattctcagggcaccagcaatatcacttatttccattacatggcacatgcyacagtgagcacttatgactaggcatttctgctgggctcacatgatcataaacataaccatcaaagagaacacaaattagcttttaggctggtagtgggaaaagaggtatttatagatgtttgtctgatgttaataactttatcttaagaatggaattaaaactttgttctacgtgacagtccattgtcatggttggaagctcatttctttagttgcctcagcaatgttttggaattgttacatcttcactatagtgaagatatctcttaagagataagccacattttagttcttatttaaggatcagatggaatgaagaacagtaagtaacttagatgcaaggtgaatgaggcagacatgatatttaaacttttcaacaatgaagagtagcattaatctgatgaagtagtgctctgagattaatattttcagaattagttttggttttataatacaaagatattgattgcaagtatctataatctgacactttgtttataccaggactttctttcctttaaatcatgaacatatctctatatattgtatcactaatatactctgaatattggaaatagattttcatctgtaattttcttctccatcatgagaagtatagttctagtgattatcttgccaagaaatattattttttggctcacaaagttttccatctgaaatatagaatacaaaaatttatgaatagaattctaatgactatgtaattcttattacactcaggaaattttatagtcagtttcatctgctcaaaggataatagagtttaccatgaaataaatcctaaaaatgtgttggttgaatgaataaaattgcgttttaataaaacttgttttactgaatggttttctgttcaccagagaacttccaagtcccaaccaagtggccctgtttccagcagcttctaatacaataaaaggataaaacaggaagataactgaagtgtcctccaggacttttgttactatttgacccacatcctcctcttttcagtcagcatcctttgttagttagtcttgaacaaatctaaacaagccttagaaagagggaatgattattttcttggcttagtgtaaccaggattctatagaactcaatccccgttgctcccaagacagttaagtggtgaaagtttttcagggaagcatgccaagtcaaagtttcttcatggccataatgggacatgcattatatgagtcttaaggattccatgtcaagacagtaaagcgtctttgcattttttttttctaaagataaacaccctgctggttataaagaccctaacaaccaggggcaaaaatctacagtgataagaggaggctgttctatttacagtgcctcattcttcccatttaaaaaatgaatttctctttattcaataaggagtaacttaaatactgtgcaaaatgtcccagggcrtgccatttgacctaaggctcaagagtggcagctaacttggcaactgcccagcccaagacggttctgattttggagttctgttttccttgcaagcaagtctgggatgtgaagctaagcagagaggttttmagtgggtgtgggagccagtgcagctgggggttgttaacaacaattggaggacaatatatgtatatatatttttaaagaggaggagagtgactgatgacttctttctggtcagaaaaaagaatccatttggatagaaaaaacttacttgcaacctggtaaggaaatggttttgtctgacttaatttaaacaggatgatatgtggatgattttgaaagagaagtatcctggggaaaacatcatgagagaggtagcttgtagctcttttaacccataaagctggtgatttaaatgccactaggaggcaaagccttgcattggggattaagggctgctttatatagcagagctccaccaaaactgaagtagtaccggtgttgggcatataaatttacttgttccaaattcttaaatacaactttctggaaagcctagcctctaagattaagtacaaatacatcctgaaggttcttataatgcaattaatccatcatttatgaagtgcacacgtgcagctcatccctatctaagccattctccaatgttggaacaggatcaatggtgtgtacgttttctcacattgcatttgtatgacatgatatgttaagaagccacttgatggagaagaattgtgccaaatctctgtgtctatgtttcacatgttaaacctactcagaatcttattttagtgtgttgttaatgttttctgatgagaatcttttcgtggtctgggcatttctagaagtcccacaaagccctgggctttggccttctaaagaacataagcatttttcaatcagtagttgaggttataaacagytactagtcactaccaaaggaaaatggtcattactgaaaggctagaagcttctctagatggaaataagcttgagcttgaccacaccgagactgttatagccagcgctttcacaggctcagatgtgtcacttcaggccactcatttaccctgcgtgttgctggagttcatggtcttcctcatgtaatcattacacctggaaaaattccagtgctatgaagtagcatttcccaggtttgctgtgttattagaattatcttttaatactcttaccataaacttcaattttcagtacatggaagaatttcaattaagtactcaaaatcaggagacacattatagacttccagatatcactgatggtaaatgctactcttttactgagattttaaatttttctatgtaaccgtatttgagcaaactttgtactactctttgctgagttttaattatacattaggacttaactaataacacattttgaaagcttttttgtgagataaaacttactcacaaatgtctctatttattttaaaaaaaacttataatgattttgaccttttaaaatttctgatggaaaagcagcttgaggaagttgtcaggtacagtgcgtgtttgttttgttctgtttgttttgattgccctttgaacatagcagattttgccttaagtatatgtgtttggtgtaaatggaagtagaggcttcttcatgccccatcctaagatttgcttatgttttagataatcatgagacaagaaacaaattggacgttttagactagtttcacatcatgataatacattctaatgagggacaattaaaatatatgctaaaatcagaatgtcttcatctaaacagggaagaaattcttcatatatattgtaggttaacagggtaatcaagatttttagaggcattaaaaaataggaaatatatgaaaacaggatcaaattcagaagtttcagaaggtggtgaaaaataggttgcccttcactcaagttccttactcaactagttccctctacaggaggaaccgttgctgccagttgctaagatagtcttccagagagactctatgtacttacaagcatgttcatacatgatcgtcttttattttatttcacaaaaatggcagaaccatatctatacattattctccaccttacctttctttttttagccaagctatcttgtagactagtgtttttttttaaactgcagcatgtcacattaataagttctaaatcaatttagtaaatcacaagcagaattgttaaaaagcaataagtagactataaagaacccagtagaagagatcaatacattgttaagtagaagagcaattattactttgtgaaattttagttataaatagatgtgtgtagtaaatgacaatgtgtggggttttttttgttgttgtttgttttgatttggttttggattttactgtggnttgtgatcaaaaagtttgaaaaacagtgtagttggttccatatccatgtagagcttcctcatttgtttttaattgttacatagtatttcattgtatacagtatcatagttatacatatgtccaataggcaattaattggtttccagtttcttgctgattaaagctactttgatgaagattcttataaatatgttattttatatatataaaggcatatctgtggaataaatatctagaaatagaattgctaggtcaaagagtgtgtaattttgataaatacagtcaatcctcattattcctggattctgtatttgttaatttgcctacttgctaacatttatttgtaatccatgaatcagcatttcagcactctcatagtcacttgtggacatgcatgaactggtaaacattttgagtcacctcatgtgcacattcccagctgaggtaaacaagatgatgttctgccttcctgtctcagctctggtactacaaatgtatccattttgtggcctattttgtgccatgttttccacatttttgcactttttaatggtgattttgccatttaaaattgcgycaagcatagtactgaagtgctgtctggtgtttcagagtgcgagaagatggtagtgtctcatggggaaaaatgtgcattttggataagcttcmtttaggcagaaattatagtgctattagtggtgaattcattgttaatgaatcaacmatatgatacacccagataaaagaagaggaaactcactgatctgtatgtgaggctgctccagaaggtgctaaagtaacatctatatatgcagcaatggaaaagatggaaaagcagctaaattagtagattcatgaaatgatgaccaataaaaaaagcatagaggacagcattattgtgtaacttgaaagccaaagaaatttatgggcatgttacccagcatcaggaaaacgttaaacccttcttggctagtgtttatgcatataattatttctaaataaataagtaaataaatatttttaaaagattaaacattgggaggccgaggcacgcggataacaaggtcaggagaacgagagaccatcctggctaacacagtgaaaccccgtctctactaaaaacacaaaaaattagccgggcgtggtggtgggcgcctgtagtccgagctactagggaggctgaggcaggagaatggcgtgaacccgggaggcagagcttgcagtgagccgagatcacaccactgcactccagcctgggtgacagagcgagactctgtcaaaaaaaaaaaaaaaaaaggttaaacagaaacacatataaaataaggttatttgttgatatgctattaaaaatgttttgaccagagatttgcaggaacttagccctgtattttccctacctgtagtggctcattatttgctaattcagtgttcatcagcattacagagcataattaccacggattaagagaatgttcttgcagatggccatactcccaccactgctatatgaatctgctcttttctccactcccagctaacacgatgttgtttcaaactttttgatatctgaaacctggtagtctgataatagtctgaaacctgataatggtatcttgtgattttaatttgcgtttattttagtatgagtaatgtaaattatcttttcatatgttttagagccattcatattcccttttgttcatatcctttttgcattttctttggatatttgtctcattgatttgtaggagatctttaaatattaagaaaattagccttttgtttatgctatgaattgcaaatatttccccaaatttgtcattcatctcttgactttcatttttctccaaatggcaaaaacaaacactctaaacaggccaggtgcggtggcccattcctgtaatcccagcactttgaaaagctgaggtgggcggatcacctgaggtcaagagttcgaaaccagcctggcygacatggtgaaaccctgtctctactaaaaatacaaaaattagccaggcaggagaatcgagaatcgcttgaacctgggaggtggagggtgtagtgagctgagattgtgccaccgcactccagcctaggtgacagagtaaaactctgtcttaaaaaaaaaaaaaaaaaaaaaagaaggaaaacgctataaatactttttaactagtcaaatatattgatcttggccatcttttgtggtctctgggtttcgttatggtttaaaagctttccttaagagagatttaaaatgttttaagagttatttggtgtttgtgtttgatgtttcgtgtcttttggtgtttgtaaggaatttggtcttcttaatgtgtaacaagtacaaatccttatctatactgagtagatttcagagtaatataacaatgaaataccacaggctttgtgatcccagagtccagcttgaaatccagtctgtgtgcctagtaaaatgacttaaaccgtactgcttcccttctctgagcctcaggttccccatttctgctttgctgagttctgctatgaaagacaatgcctggcacatcttagattctaagtgttagctgctccttgtcctgcttccctgaagtcttccactaagaaataatttgttaaattaacttgcattatgcatgtactacaagtaatgaaataatttctcttaaaagtgttttataatttaaattctagacaatttcttctgagattttcaagctagcgtgaattaataactgaaaactgatttgaattgtcattattaaaaaatgtgtcagtacaatgctttgccttttactgtgggatgggataaatgtttgtgaaaacagtgaagaatgaarttttagacattgagttattttctttaaaaactcctaaacactagatctagaaattttattgaaaaccattcatataaaaatagtcatttaatgaagttcatcagtgtattctaatttatcctcttttgtaagtctaaatttttrtgtttattccattttttgaaagcagactacatttatagggagaataatacatttaaaaatcattaaaatgatatttaaaaaataaagggtaatgtctttatcctttgctctcatggtcatattggctatatttttatgatttttcttggctaattcctgagcagttgcccccttaatattcggggcatgaggaaaaggtgcanttttagaaatgctttaactttgtatttgaataaaatgtattgtcactactctagagaacttcagtaagacttgagtgcctttcctctgttaggcaagttagactatcccagaccttgctctggatgtcaagatttttgaagtttaaagcagatgtgtgtggacgaaaaaacatctggtgaagagaacttgcttcattgcgtgacacttttccttcactcttcagtggagcgtctgttgagcaggttggcaggtttgataactaattaatgataagggaatgagccatgtatctgaggaactccattttgccccttactgcctctttcttccccacatgtctggcaaagccttcagaggctaggatcatggatcacacagttgggtctcaactcaaacrcttgtctccaggcttaactagcttagagatataaacagatggatggcctgggggacagggtttagtgttgagcaatgcagttttattatcagggacttttgaaatttttattggagtacattacaactttaaaaatgccttcgaaaactcagaattttgatgctgtgtactggaatgtgacagagctttgtgggcatccctggatgtttgcagttttctttttgtaactttttatttagatataattttatacatacagaaaagttgcaagaatagtgcaagggacaaccatgattccttttcccagattcaaccagtgttttcctttccttccatttgctttcccatcctcatgccctcctccctctacaygcacacgagcatgcacatgcacacacacatacacacaaacaaataagtgcatttttttccctgaactatttgagagtgaattggagacatcaggctcctttattcctaatactttggtgagtatttcttaagaacaaggccattctactaaataatcacagtacagttatcaaagtcatggcttttagtattgatayaacactactgtctaacccagagtcccttttccaactttatcaattgtttccataatgtcctttataacatctctccccaccaccaagtccagggtacaatccagaatgacacattgtgttcagttgtcatgtattctttaaacaggaagtttctcaactttgtgttttctgactttggcatttttgaagagttcaaaccagttatttagtagagtgttgctatttcaagtctgtttgatgtttcctcattcaattctggttatgcatttttgtcaggaataccaaataccacagaagtgttgtgtctcaaggtatcttatcaaaaggcacatggtactgatttgtgccttaattggtggtgttagctttgttcatggagttaagttggagtccatcaagtgtttccacagtgaacaaacagtttttcctgttataagaattttttggagagatactttgaagctatgtaaatagcccatccttcttcaaatttccacctactagttttagcaaccattattttctaactctgttattttttctatacttattagttggcattctgctgaaggaagagctttgtcttcttccccatttatttgtttggatcagtatgggctcactggttctgactttgttcagtggttataactcattactctcattatttattttcataggcacagatttttgccagtaagagcccttcaagttgacccctgggtcttttggataagtcccctttactctttgagcatttccttacttttctggtacaacaagatgttccagattcattttatattttctctgtcccagctctggaatggacatttctccaaagaatcctggttctttttcgtagagaatggtatttagaaattaagggctgggtgcggtggctcacacctgtaatctcagcactttgggaggccaaggcgggtggatcacctgaggtcaggarttcgagaccagcctggccaacatggtgaaaccccgtctctactaaaaatacaaaattagctgggtgtagtggtgcatgcctgtcatcccagctactcaggaggctgaggcaggaaaatcacttgaacctgcgaggcagagtctgcaatgagctgggattgcgccattgcactcaagcctggacaacaagagtgaaactccgtctcaataaggaaagaaattaagacctggtgtgtgtgtatgtgtgtgtgtgtgcatgcacgtgttttaaaataaaacacactatggaatattacatttacaaaatcactgtgtaccgtatgtacgagtgtgtgtgtgtgcatttaatgttacaagagtcaaacagaagagcatttattttacatgtaataatcataacttttgacaggaaagagatacatttttcatttcacagtaaatggcattacacagttttagtgataaatcatcttgacatttatgaacaagcaaatggaaagtggggaactgagtgtgttaaatataaagctatctttaactgttctattaaaaagcaaagatttattttccatctgtratctgaatgtgcctatttgtgttctcttttatggcagtggaatttctgtggagccacacgacggagagcatgtgtgtcggatatatgtcagcccaggatgggaaagccaaggtaagtgggaaaaaacggtcataacctgaaaaccttgtagccrtcgcataaayctctaaccagctaagttgatgtggatgaattttttcagctttttttgggcagtagctttgtggtcttcataagcatccgaataagaacagttaacaatgctaacagctccagagaaaaccagcatatctattttgcttttggtgacacagcaggggagcattaggaggagcctgcccactttcccccacagcccccagcttgttcctttttgcccattgtgaataagtagagaagaggaaactggggtttgggaagagaaaatgggagtgaagctgatgagctgacatagatggatgwttctgcaagaagtgttggaataaaggaaactgagtcaaacaagctttaaccctagaaagcatcctgcatgtttgatggcacaggtggctgacatgcttgcaaatatgacctgtctcacctttcagtgtgttctgtcatgccctgacmtggtgtcttcatgggcagaattaaaggtctctgtccatgtcccacatgcctgtggcactcgtcgctcagtgagttrcaataatcacataggcatccacatactatctccggagttgctttgcttccctggastcatgatggttgagcctgggaataagcaacatgatttgtggattttattttatattggcctcatgttcttcttgttcataaattttttagaaacagctgtggcctgtgatgtttacttggcattaaagtacctcagttataaagctgtgaagttgtgcagcattgtttttaaaagaaatgatttattttgcacattttgacatataaaataggaaaacttctgatatgagcagtctgwtacagattgaatcataaaggataaatataataaagaacactttattgcttatttgtcatgtaataccyatcctgactatcctttgtrtattatccagccagcctgtagctccacagaacttttgtgagtagtgtaaagaacatttattcagacaaggattgacttatattgtgaaaattttgctgagatccaccctccccctttgcttcaccttcatctggtacaatattcctattgtgttagtagacctgtttcctaagagaatacataaaatattgctttatttcataatttatatagaatggaaatataattgtccattttaaaggtgatttaagggtttagaacagcactgtctaatagaattttgtgtgatgtaaacattttatatctctgttttccaacagggaagctactagccacatgtggttattgagcacttaaatgtggctagtttgatggaggagctgaattttaaattttacttaatttaaatttaaatagccacatgtggctcgtggctaccatattgaacagcacaggtttaatgaataagtatgaaaatgattattcatattttcagattcatttcttctcagtgacaaaacagttcccatacataaaacaagcctgataaaccccaagaatccttgcctaacagtagcttgaagccatttcagtttctctgtccccttaatattgattcagaactaagattgctttttaacaaaagagcatgtttgaggtggacgtcagcactgaagccagtctgatggggtatgattatgttaytaagtcccttgtgtggaaattttttgttatccttgctggtggcccgtgaaagacaccttactatttaatgtgaaatataggtaggaaagagtgtagagtcctgctatgagcccgaagatatttggcctccagttatattgcttgacatctggtagacatggttttcttattgctggtaaattctccagctggtagtcaattgggccagcagatacagctggtcctcttgcctctcttgtaaattatgtttttgaccttccttgaggagagttaatccctcttccttcctttctcctttgagcctgtgactacaaatactttcaaggaaaaaaaaaaaaaaaaagaaaaccccaaaacaaaaacactaatgatttggctgcggaattttattgatcaaaaagaaaaattatctcttttgttataaatgctagaatttttttgtattgcaagtaagacaaagttatagatgagaggctgagctcaaaagagaaaaggggctataacaatgtttgtattctgtttaagctttggaccttcctctccctctggtttcctgacttctataaaagaatagttgaactaactagtggcatacctgttcagcatcatgactggtttccgaaacatgttcctccataatgttgagagccgtggtagcgaaatgagtaagaaggcatcttaaaatatttaaaatttaaaaactatttttaaaagttaaaacacttgtgcccttgttttcaaaaattgtcttccttctgcttgttaccaaactcagaaactgaggccacctggccatttgaacatatatgagctagttgtgtttaatcccaagttaaagccttgaattaaagcttagctaaaaatcatattgcgtagaaaaggctggataataatcagtatcattgtaaccagaatgcatgtataatttgaataaatagaggtaggttcttttacaagtcttttttttttaaagaatgttcttgcaattaaatcatttaatttaatttctaaactgctttgataacataagataaagatttatttttaaggagccaaaattagggcatcagtaccagttggattttaaaaacagattgtccgtatcctacccagatagcagacagttaatgaagagtttttaataaacacccagtgtgcatggactactgtaatagaaacaggtgttaaaactggcatggaacttattcagctataatacatgaaattaggtttcttttattatgtagaggtcactttttataaccacagtgaaaatactgttataaaaatttccttgaggaggagcagactattttatagtctttaagtgtctctccacagacttcttattagttgcagggaaaaataataactatataatggagaaaccaggcaacaccttgaccatgtgatcagaattaataccaccaatgaggggcagatggacaatatgtgcctctggctatgataacttgaggatacagtatcacttgtgtagtattccatctggaaatgtataacctgaacctaactgtgaagaaacatcagacacatttaaaatgaggaacattctgtgaagaaagaaagaaagaaacgtgttcttcaataatgtcaatgtcataaaagacaggctgcagaaatgttccagaggaaataattctaaagagatgtgacaactaaatgcagtaactggtcctagactagatcctatatcagaaaaatgctataaatgcattattaggtcaatttacaaaattggaatatggttagtaaaaagtgttttatcatggttaaacttactgaagttgattactgtactgtggtgtataatatttttattcttatgaaatacacactaatgcatctaggggtaaagggccataatatggacaatattttctcagtgggtcagaaaaatatattatgtggatgaatggatggatagagcaacagcaaattgcaaagcaaatggagcaaaatgttaacagtaggtgaaccttggtaaaggatgtatagatcttcccggaacgattgtgtaattcttaaattattttcaaattaaaaattttttaaatgtcactcttgggtcttgtggcacatttgattagttctttgggtcttgtacttgaaatgatgcmgttcaaaaaatatcacccttggtttataaccaagtctgcattggatgaatgattacattcccccaaactattgcctttttctcattttgaattcctgactagaatgaccaaaattcagataacacatcccattacaaatattttgcaaaatatttctatgatagttccttgttttccagtgggatctaagagagactaagctttttcataatcaaggtgctgtcctcttgggatgttttttgttatattactcagcttttcttaaaaaaaaaaatttactcaacaaatatttatttgtgatgtttctctgccttgtgtgacaaaccctgtgtcatactctgacacatggtaatgaaacaggacagatgttgcccataccatatttccctcacctagggaaagcacagggcactgggtggtaactcaatgatatttacattttgtttttaacattttctattttaatgccatgaagtcttcgaaacctcatgaggtcgtgccaggatttctgttcttggcacatctgactagttctttgggccatgcagttaaaataaataagtattgggatgggtgcagtgccaggaagttggagcctgggttgccctcccactccatgcacactgtgagctgtggtttgatcactctgcctctggatcccagaggcctcatctgtaatatgagaataagaaatccttaccttgccttaagcctttcctgtgatatgatatgataagaacgaggaagcaaaaccttatctgtctcaatacagatgactagaccccattaagtccttgttgttgcttccaatctgcagaattccaaattcaacattccagattacataaacaaatatgttgccacttaattttcagtaggatttttgtaataccaatatagtacctactgtgttctaacatgttttatcttcatgaagatggtttccaggtctttaaaaaaaacttagtgaatgtatatttacaaaggatagcagagatgagatttctgagtgctttttcctaggcttaaaacttacctctcacataaagccataggagggagacttaagtataaaacatgatgtacacaagggggggttatcaaaagaagtgcaaagaaactccacttytaattagaatgaagaaagttacaagagactgttgcttctactcccaactatgtgaatgagctgcataatctatagaatcataaatttttaaaaagtatccagagaagttattaggtagagaaaaacctaagtaaactaaattccagaaagagacaagcccttcctaggagacaaaaacctctgattgctttattccctggcagagcagcaggaggaggagtcaaactcaacacagaggtatataaagacaaatcagccaaatttttaatgaaatctttatggccgtgtgtgagctggtgtgacagattaaaatcctgagacactccattcacagagagcttatacccaccgccagtttttctctgtgaggccttcatcaagtggcaacacaccaaagcttggagcagagcaaagaattgtgagtgattcattaaggtgcataagattttcaccaaatacatggcagtggccagagaaagactagaggcatagcaagagagccgcaagacaactcggaagcatagtggtcctttatcaagtgcaacacagttgcaacagaaggctggattaaagcaaaagagattttaaaaaacctctcctgctcccaacatgtacagggccttcatcaagggccaggcagtgttgtacagaagcctagtgccagggtaagagagtgaagaaatattccatgacacagaaatctggaggaggttacaaagagcaaaacgaacaccttagcaacatggaaagctgacggcttgcctataaacaaagagaagtctcccgtggttagaatgctggtgcctggactataagaatggagaattctctagagtttcacctgggctcagatcccaaaccttgcttaagggaaattcctgatccaggatacaaaatcaacacgtaaaaattagtagcatttttatacaccaatgatgaactgcctggagaaagaaatcaagaaggcaacaccatttacaatagctaaaaagaaatacctagtaataaatttaaccaaggagatgaaagacctgtactaggaaggctacaaaacactgataaaagtaattgaagaggacacagacaaatggaaagacatcccatgctcatggatcagaagaattagtatctttaaaacaatcctattgaccaaataccaatgatattttccacagtaatagaaaagacaatcctaacatttatatggaaccccaaaagagcccaaatagccaacgcaatccttggcaaaaagaacaaagctgaatacttcacactacttgacttcagaataccttgcaaacctatagtaaccaaaacattatgataaaaacaggcatatagaccaatagaacagagtagagaatccagaaatccatacctttatagccaactgatttttcacaaaggctctaagaacgtacattggggaagggacgccctcttcaataaatgctgctgggaaaattagatattcatatgcagaagaatgaaactgaatgcctgactctcttcatatataaaaatccattcaagattgattaaaatcttaaatgtaaggccccaaactataaaactactagaagaaaacatagggaaaatacttcaggacattggtttaggcaaagatttttgtggccaggacctcaaaagcacagacaaaaaatcccaaaagagacaaataggactcttattaaactaaaragctgcttcacaggaatggaaacaattgacagaatragcagacaaccagttgaatgggagaaaatatttgcaaacttttcttctgacagaggactaataatcagaatatacaagaactcaaacaactcaatgtttaaaaaaaaagatcccattaaaaagtagccaaaagacatgagtagatacctctcaaaagaagacatacaaatggccaacagacatgtgacaaaatgctcaacgtcagtaatcatcagggaaatgcaaatcataaacacagtgagatattatcttaccccacttggaatagcagttattaaaaagacaaaatatagcaggtcctggtgaggatgcagaaaaaacgaaactcatacactgttggtagaaatgtaaattcatacagccactatgggaaacaatatggagatttctcaaaaaactgaaaataggactaccatgcaatccaacctttctactactgggtatttatccaaagaaaaggacgtcagtacatcaaagggatacctgtgctgtacttgcatgttcattgcagcactactcacaatagcaagtatatagaatcaacctaaaaatatatgaacagatgaatggatcaagaaaatgtagtctgtatacacaatggaatactattgggcatattaaagaatgaaatcatgtcatttgcaacagcatggattgaagtggaggtcattatgttaagtgargtaaggcaggcacagaaagacaamtttagcatgttctcacttacgtgtgagagctcaaacatgctgatctcatggagatagagagtacagtgataaataccagagacttggaaaggtgtgtgagtgggaggagggaatgaagagaggtcggtcaatgggtacagttagatagaaagtatgagttctaatttttgatagagtaagttgactatagttaaccacaatgtattatatatttccagtagctagaagatagaacttgaaattttcccaatatgtatagaaatgataaatactcaaggtgatggataccccaaataccctgacttgatcataacacattctgtgcatgaaacaaagtatcacatgtatcccatacatatgtaaaatattatgtgtcaataaaatgattagtatgtcagttgaaaaaaataaaaacataaaataactgatattgagtatattcacatcatttaaaagataatttcaaacccaggaaggatgaaaaataatagaaaaagttaaatgagataaaaattagaaataaaataattttcaaaaatgaaagctggtatggctatattagtgtcagacataggagatatgagataaaacaggacatttcatattgaaaatgtggtccattcaattaaaaaggtataaaacgtctaaatgtatatgtgcctagtaaaagaaacaaaaattgacagtaataaaaggagtaatagacaaatctgtagtcatagttggaaactttaacatccttctttctctcagtatgaaataagacatacaatagtaaatgacttgaataaaaattagtaaggatatgaataatagacccaacttgaccaaagtggtatttatagaacattacattcaacaagttattattttcaagttcataaggartatttaccaagagaagctgacaattattttcaactgaatgataattaaaacaatatatcagaatttataggatgcaattaaaacattaaaaggaaaagtatgtccttaaatacttatggtagaaaagaaagtttaaaataaatgagttaagctatcatcttaagaagctttaagaagaatagatagaaaataatcaaaataagaatgcaagcagtaacatagaaaagaaattttaaaatggagaaaaacaaagctagacgaagttctttgaaaaaaaattagtgaaattgataaaactttagaaagaatgattaggaaagaaagaaagaaacccacaaattaccaatagcaagaatgaaaaggaaatagtaatgcattcaccgattctgtaggcattaagtggctaactttatttcaacagaggcagcaactggatgaaatttattaatttgttgaagaaaaccaacttaacaaactaaacacaaaaaattttaaataaccatttacatatttaagaaattgaatttctataagcaaaacattctcataaagtaaactttatgcccagatggcatcactggcattttatatcagacatttcaggaagaaataacattaatcttatgccatttctttcagaaaaacaaagcagagggattgttttccaacccattttatgagacaagggtaacctcagtatttgacaaagatgttacaaggaaggaaaactacagaccaatagctgtcatgaatatatatgcggagatgcttaataagttattactttggaatgaaaaatccagcagtattattgcccgtggacaccaaataaggtttttccaaggaatgcacagttgacttaacatttcaaaagtcagtcattgccaacaaatgatcctggaacataaggatatccacatgtaaaataatgaagttggaccctttatcccatatataaaaactaactcaaaatttatcaggaaccaaaatattaagagctaaaactatgaatttcttaggaggacttaggagtaaatctttctgtccttggattatgcagttatttcttagatatgattccaaaagcacaggcaacaaaagaaaaaataaataggtcatcataaaaatttaaaacttttatgcttcaaaggataacatcaagaaagtaaaaaaagcccacaaaataggaaaaaatatttgcaaatcatgtaattggtgaggagcttgtaccagaacatatatagaactcttacaactgaacaataagaaggcataaaatgggcatgagatctgagtagacatttttctaaagacgatatacaaatagccagtaagtacaggaaaagatgctcaacatcagtagtcattagtgaaatgcagatgacaaccacaagtagataccacttcacatccaacaagatggctatgataaaaattgtgaatattaacaagtcttggtgaggatgtggagaaattggaaccctcatatatcactgataggaatgtaaaaatggtgctgctactttggacaacagtttgkcagttcctcaaaaagttaaacatagagttaccatgtgacccagcaattccatttctaggtatatgcccaagaaaatgaaaagataggtccacatgaaaacttgtgcatagatacttatagcagcattattcataacagcaaaaaaagaagaaacaatccaaatgcccatcaactgatgaatggatcagcaaaatgtgaaatattcatacaatggaatattttcagctgtaaaaaggaatgaagtgcagatatatactgtagcttggatgaaccttgaaaacattattctaggtaaaagaagccagacactaatggccacatagtgtatgattttgtttatatgaaatgtccagaataggaaaatccatagagataaggtagattagtggtagaggtaagggaatggggagtgagtgctaatgggcacagggtttcttttagtggtgacraaaattttctggaattagaacattgcacattttgcaaatatattaaaaactactgaattgaaaagttatttaagtggatgaattttctgatatatgaattatatctcagtaaagctgttaaaaatgttaattgatataatttactctgttaccaaaataaaggagaaaacccatatgttcctcttgattccatatgatcatctcaacttgcatgaatgataaaaacctcaaaatagccgggcacggtggctaatgcctgtaatcccagcactttgggaggccaaggcgggcagatcaccaggtcaggagctcgagaccatcctggctaacatagtgaaaccctgtctctactaaaaatacaaaaaattagccaggcatggtggcgggcgcctgtagtcccagctactcgggaggctgaggcaggagaatggcgygaacctgggaggcagagcttgtagtgagcagagatcacaccactgcactccagcctgggtgacagagtgagactgtctcaaaaaaaaaaaaaaaaaagaaaaaaccctcaaaatatgagatatccaaggaaaattcctcaatgtgattaagggcgtcatctatcaaaaacctacagctaaaatcatactaattggtgaaacactgaacactttctttctaacactgacaacagacaaagagggcatccactcatcacttctattcagtattttattggatgctccactagtacaataaagcaaataaaagataaaacttggaaaagaaatagtaaaagccatagttattctcagaggacatgaaatgaatctaacgaatgatgtgcaagacgtgttccctgaaaactataaaaccttgctgagagaaataaaagacaatctaaatagagaaacatgccatattcatggattggaaaacacagtaagatagccattctttccacattcagctatagattcaaagcaatctcaataaaaattccagcagacatttttaaataagaaattgacaagttggttttataatttgtgtgggaatttaaaggacctagaactgcaaaaatcaactttaaaaaagatcagagttagaggacttacagtaccagactttaagacctactgttaagctactataatcaaggcagtgttcctccacagaagaggcaaccctaaaaatcaatgaatcagctttggaatcagcaggaataccgtccagctctgcagtttcacagcattctgagggaagggaattgccagattggttgatgcagcagggtccaccagacactgcagaaattattaaayattgtctcagaattatagacggaaatttgtgtctcaggaggaaactggctgggcatggtggctcatgcctgtaatctcagcactttcggaggctgaggcgggcagatcacaaggtcaggagatcgagactatcctggctaacatggtggaatcccgtctctactaaaaatacaaaaaaaaaaaaaaaattagctgggcatggtggcacacacctgtagtcccagctgctcgggaggctgaggcaggagaatcacttgaacccaggaggcggaggttgcagtgagccgagatcacgccactgcaccccagcctgggcaacagagggagactccatctcaaaaataacttaattaattaaattaaataaaccaaattttattcaatgtggagggccagaataatcaccagcagtgtggatgctgtttgtcgtcagatgaaagaattgtctttacaagaaagatttctaaaatgagaaattatacattcaacaaccttaataaaatattcttttaaaaaaatgaaagaggaaatttaaatggacacttgtatctcctgatgtatgtattttggtcagcttcttcacaagcttacctaactgcttacgtactttaaactttaattaagtatacattttaaaatgttatcctatttactcttggccttcaagtattaccagtgttaaactactaaaagcacacaatatctagtaaactgtcataggtttctcataatctcacttttctttcagtctgtttagggatataaagaatttttcaggcgaagttgctgctttagggaagtgatttttctaaaattaggtgaggattggtgaaataagaacacccttatttgtttttaattctcaaattttttattcacaaggttattggggtataactgactaaataagtgtatctggctcttaaagataaaaatataaccaaggtaaaacaggtggctttgtggtattaagactagggcaataacacaaaggattatttgtgctaaaaatattttttatgtgtaacaaaggattatttctgaacagagattcagaaaaaaatgtaaatgaaagataaattaagaaatcaaaattgatatagaaataggtgtttgactagaaattgcaatttatttgagatatttttcttttattcttaatcattttgaatgtgattatgtatgtaaatcttgatgtgatgactattaacttttgtcagctttaatgtctgaaaacctcataaaatcatcctatttacctaaataatgcaatttatttatttacttacttactttagagacaggatctcactgtatcacccacttggagtgcagtggcacaatcatagctcactgtaacctcaaattcctgggctcaaacgatcctcttgcatcagctccccaagtagctaagactataggtacaccaccaggcctggctaatttttaaatgttttgtagagatgaggtcttgctatgttgcccaggctggcgtaatctcaaactgttggcctcaagcaatactcccrcctcggcctcccaaagcactgagattacaagtgtgagccactgcacacctggcctttttataaaactttaataagatcttcttgggccaagggtaaaccctcacaaagctaaataattttcctacataactttaactttgttcacaaagttatgttgagtgaacaaagccagacatgaaagagtactaagtgaattattctatttatatgaagtttaataactggcccaactaagctatggtgatagaaatcagaaagtgattgttcaggaaaagggcatgagggaatttgggggcagtaatagaaatgtcctgtgtggaaaatrttctccttaggatttggtttcatggggatacaaatcattaaaaatcatcaaaccctttactgaacatctatgcactttattgtgtgtaaaatcatacctctgttttttgaaagtcttaaaaatgatattagctagactatctgggtttttgtttttgttttttacgagataggctcttgctctgtcatccaggctggagtgcagtgacccgattatggctcactgtaacctcaaattcctgggttcaagagatcctccagcctcagcctccctagtaactaggactgcaggggcacacctcacctggctaatttttattttatttcttgtcaagacagggtcttgctatgttccccaggtaagattgtctttaaagaggcatgtaatgattgacagcatgggctttagaattagtcagacttggatttcaatcctggagtccctgctttataagccrgggcaagttacaactttgatccttagtttcctcatctattgatgctttgatagaattctgaaaattagttgaataataaaaatgaagtgcatgtaatagatgctgcatttgttatgatgggtggtggtggcagcagtagtggtggaggaaggaggtgatggtggaagttgcagggaatttctcaggaccatcacaccacagctccacaggccccatttacactgcagttatgctcccaaaggtggcatttatattgactatgacaagagtgatgccacctgaattttcaccgtgctcctttggtggaaatggtaatggttattacattttgacaaaatgcaactctaacttgcaagttaatgttaataagttaataagttaatgttaataagttaataagccagctggtaagtgaattcagagttcccagaacaggaaaaaaaaattgttggaagctacaagaaaagacactcctccctgaaccctgcaattcaagccaaaatggtggcaaaggagctctttctaaaaactatctgatagaggtctaccactttgacagcgccacaacttaggtttttaaatcaaacctaaggtgtgccttcagcatttcttttacgctcacccatccaggtaattttccttttgaaagaagaaaggagaatattccttactagctgtgttaaatttctcttgtgtgaaccttgattacaggcaatcttcttgtattccactgagcactgggcagtggaacacctacaggatgtattgaccatgaatcccttaaaagagacttccatttcacaatagtggccaatggcatttagtcattgaatggatgtatccagctaaatagatttattggaccatattttagatttgacaggaaacacctagatacaaattggccttagtcttaaccaaattttaactgcttttgataatctagttcttatattatccaacaactaaaggcatctgatccctggcgggaagccaactgcctcgggatggtagttgaggcgccaccaataaacctatatactaagaaaacatccgagacagccaagtttggcaagtgcacttataaaccacaggaaaagtggctaatcactgattttacttgtaccttttaagtttgcccagaatttgaaatgtagaaacttgtgtttctttttcatgctcttagggctgccaggatgatcccattgggtctatttagaaagtcatttgcacaaacaggaaaagactgcagaagattgaatgtatgaaaaacagtttcctcagcctcaagttaatttctaacagtcgttggtaattttatttttgcctaattagtcttacatcattaatttcttccaaatgattcattcaacattgctccaaagcaataaatagaaaaacaaagagggaatttactgtgttgttaagagtataagtcttcccagaggtgcgaataatatgtattcaaattattctcattttaatcatggtgtagggtaagatctttgcaaagataaatgtctattttaatctattacttgacttgtagaccctccatgttagtagaaatgaagtggatgaacttctttattttagcaacatgaaaagtaatgaaaacattaatttctctatctccacatacgtatgtagttatcagtcacagatgtgaacctaacttagaatatcaccttgttaccttctagtacccaacattttagataaatatgtatcttcccagccagactcatgcctgctgtttgctcacaggacatataaccatgacatgtaaatgagacaaatgtacttaaaaatgattgactttattatgaacaggaaatgagtaatgattatctatggtgtttttgttttttggttgggaagcagtagccaaatgatgaaaggaattttctcttgttttttcagtctcaagacaaaaactataatcttggtcatgtcattgttatttcatgttaacttactaacttgagaaaagatattggtttctatgattataaatattgagaatcccccattgattttatgatgtaacaacttttattacattattttattaaatgggtgagttacagatgtggaatctactaggtatatcttatatgtgcaggtactaatgacaacacagggcccaacacatagtaggcatttggtggacagctctttaatgagtgactgcatgttgagctttagggtagaactttgagttaggatggtgcgtagatayaacattttgttcccactgtcctttcttcccagtaatctccagatttaagatcaaaagctgtattcatcatagcagctttgaaaaaaattaaatatatataaaatacaaattatatggaaaaattttacacagatttaaacatttaaaattttatgttaaaatatgatttttaagttctggattgttttctcctataagagcagatgatttggcaacactgggacccacttcctatgtggcagtgattggttagagccaggtggtagccgccctgtttggtgaagcctgggcgcttcacttccacagtcctacacctgacctgcttcacaggcatttgagactaacccgtgttgtagattttgaaccctaatcaagtctatctgttagaatacatttttattccagtatgattcatccaaataatatagtttatgtttttttaaaagtcttcatcttggagtgcttgttctgtttaatcctaaggattagaatttgtttgtgatagttacaatgtatgacttttatgttctgtaagtaaagcaatactgaaaatttgtgaaaacttaacattttagtattcactaattgagacatttggctatggttgcgctgttctctctatttacatttctttcaaatacttctggatgcagtaagtggtaggtactgacagtttgcttttatgctcttgagctgtcatcactgtactgtacatgtttggactgcactgtctgctgcaatgttgaagcgataaaatgaaacttaatttaggatgagggttatattaacaattcactagtaggagatgctcagagtacttggaaatagatctttcttcatttgaaatagaaaattaatgttattttaaatgtgcttcctaaaacagattagaaccccaataattctttgatttcttccattgatggcttttgtgaatatcatggtaaaattttgaacagttaagagttagggttattacagtagctaataatgactgactaagamggaagccttattacttggcttgagatttcagctattaaaaaacctcagtttacttaggagtaaaagtttgataaaacacagtatctcattttttgaatgaattatttattaaataccattgagtgccttctatattgaggtacttttctggggacatcatagtgaaccaagcgacaagaatccctgtacttgaggacttacatactggtgggggaaataacgaacaagataagtaaggcctatactatgtttgtgataagtgctaaaaagagatgtgaagctagggaaggggttaggaggtacagggattccagcgttaggtaggtttcacttcaaaggtgtcattcgagtaaagtcttggaggatttatgggagcaaggcaagaacattccaggcatagggaatagcaggtgcaaacactctcaagtaggagtgtgcctggtgtgttggagggacagtgagaaggccggtcttagtgggtcagagtaggcaatggaaggtcagatagattacatagttttttatccatggtcagtatttgggcttttcccctgaaatgggagccactggggagtaatgagcagtggaatgatatgaactgacttacatcttaagaggtgactccagctgctgaaagggaggccgggtggaaggttgttgccatagaggtgagtgataataatgacttggactagagcattatccacacaggtggtgagaagtagttggcttctgtgtgtattttaagatagagccaatgggatttgctgttgggttggatagagatatgagggaaatagaaaaggcaatgatgactcttaagattttggcctaaacagaagaatagaattgccatttactagggtgaggaagaaggtgaagttgggggaaaagacttgaggggaagtagcagaaactcagttctggacatgttaatttcaagatgcctgttaggcatcaaatggggaggcccaaaaggtagctggatatgtgtgtctggagtttaggagaaaggactaagatggagatacatattagggaatctcagcatataaacatttttttaaaaaacatttggatgagatcaccaaggaggtgaacacagacaggagaaaagattcctggggaaattttgtacttataagttggggaagcaaccagggagactgaaaagttataatcatagaggtcagaggagaaccaggtgagagtggtgtcctaaaaaacaagggaaaagggtgtttcaaggagaagcaggtgatcaactttatcagatgctgctgctgggccttgtgaaattagatttgaggacaggctattggattyggcattggaagtcatttcttattttgataaagaggggttttggtggagaggtgaaagcaaaaagctgattatagagggcttaaagagaaaatggaaggaaagaatttgaggtaataggtgtagagaactctttcaaataactttgctgtaaatggaagtaaagaaatggagtggcgactggaggaggaggttgatctatggagttattattcttacctcaatttccagtgcaaccagctgcttcactttatatccaaaacacttcatagacatttttctttaaaatgagtggaagaaaagtagtctaactgttgagtctttggacattccaacatttagttgctggggagatgaggaagaatcagcaaaggaaagtgaggttacgttttggagtaaaataaaaggaaagtttcagcatattttttgtagtagttccaggtacagctagtattaaaggaaggcattccttgacatttgggatgaactaactttgacagagtcacacaggtcttttgaatgcaggatgtctgaacctttctgtgctcatgtgcctgtctggctctaagaagggtagaacaaggtggagcaatacacttgcagcttttgcccatgctcccgcactgccccccgcttttttttttttaaagagagagcacctgccaggacccagcagaagtcagcttgagaaatgctgctttctgggtctccgtgccttaacagttctttgggggcatgggtcggatcagtaagtcaggaagcacaagattttgacaaagagaactttcttcaaatcagttgttggtggtttgtatttttcccctccaaaattcctcactgacagattaactgagattctcaggaaattgtccattacacaaatggagagtagcctcattcttaatgatagtttaagtgttagcctttcatttcttttcaaatagaagatgctcttttcaaactatagtaagattcatgttatctggcagcttaccaaccagaagaccataaatgacattttgggtttcacctagtacaaatcatcaggatgttgaggccaggttccctatgaagaggaaaagacagttcccttgggctgtcttgaccaaggaaatggtgacccatagcctccccttacagacctgaagggaaaccctcagtagtaaaactccgtagaaygtcaaaatcagaaagaactctgaatataattgagttgaagtttttcacttttaccgaaaaagacattgaaacccagagagccagtgatttcccgatccagaaactatccaatctatcaacagcagagttgaggctcaaaccgatttctctgagtcccagaatcatcttgaaatttgttggtaagatttgttccagtagctttcctgagcaagctctgattcaccctgaaaacctcctgcagttaaaggcatgtctcttaacagagccagatttagaatcctccttcatggtaagtcttcagggggagtcaagatagccctaaatttggagttcagaggctttcattcacatctcaatttttccacttcctytctgaccataagcaaaccacattatcattctgtctcattttttttttcatctgaaaaaaataggtatagtatacatctttctgtctgacatggtattttgagggatctcattgatgcaaaagtgctatggaaactaaagcattatgcaaatatagggacttattgttaagatttcacaaagaactagtttctgcatcctgcaaagacataattgcacttagagcgagatccatgtttcattcttctgttcccccataataacttgcagaataaatatttgttaaataatggagcacttttatcacctgtagcaagagggaatattcatgataattctccatgtgagtggtgaaataatagttactgtggggcttgccatgtttatgtgagtatcttcactgggcttttaacctaaaaataggagggaactcttgtctgatgttgcctctgactgaagtgtggtgtcagtgagcctggtgatagtaagaaccaaagtggcctgtaggctggaagaatatgctgttctcatcagacagcattttaatcttattttaaggctccttagacatgatatttgtatgtgagaacaatagaactttttgccctgtatatatccctgtttcagtgctaacaatgaaatttacccgaatgtcatctttgtgtttcatctggcatccttgttttcaacgtggagaatgaggtatgagcgacacacagtaagataaataacatatggcawtcctttctcattctgttgatatttctgattggttggctgaactcgggaattgtatcttcaaattgctctggcctatttaatacttttaatttaagacaatgagaaaatagaagtaaatacttttttttgattcattaacaatgtatacacaagctaaatgaagtcagcatcagagattgtccaaactctgaaaggatgctctagagaccatctaacccagtcttcattttccgttgtccaatatcacacaggcttagtaagtgggcacccagatcttttcacccatagttaatggatttttattctataaaatatacacattattctagactatattaagaaggttcatgtgaaactgtcagctagttgagtacatctgctttcaggatgaagtctgacgaccaaactctatttttagagcagttaactacattccaaggtttaatgctgcacacaaagaatgcttagaatatagttattcacaaattgtgtctttttgaaagacagctcttaaaaagcgatgggtagggaacttctgggaaaaggataggggtgggtggcagtgtctcctgagtcaactcattaagagagaaaaaaatgtaaaagcccacaatagaaacaaggcaataaaaaccaaccagacacacttccccagcccttctcttgcctttctctctggacttagtcatttaaggtgtatcacgtttgtggcactaaaagacagctgagggtggccgggcgcagtggctcatgcctgtaatcagcactttgggaggccaaggcaggcggatcatgaggtcaggagatcgagaccatcctggctaacatggtgaaaccccatctctactaaaaaaaaaaaaaattagccaggtgtagtggcacgcgcctatagtcccagctacccaggagactgaggcaggagaatctcttgaacctggtgggtggaggttgcagtgagctgagatcgcgccactgcactccagcctgggtgacagagtgagactgcgtctcaagaaaaaagaaaaaaaaaaaaaaaagaaagctgagggtgactattatcatgtcaggcaagaattcacaatgcaaggatgtaaggtactacccagttcacartacagtctcacagtaccatataccatatttacattgcccaagtagtgataaatacagaagagaagcttaacttgttgttaaatggatttttattctataaactatacacagtattccagattatattaaagttcatgtgacattgttagtgcatgaaaaattagatgttttctatgactcagcaatttgaaaaataagtaagaattaacaggagaagggaaagtggtggaaacagatatctgtttcttcaaaagcacgtggtaacataaaattgagctgaacacacttgtctcaggaggctagagtcctgctttccaggaaggaaaatgcccatgcaaacaactttaccctagtgtttttcatgttcctccttgtgctggatttgtcagaatgttattaatgcagcactatacaacaaatggacaagactcaagggcccccatttgactgctgtttaagttgctcatgcctccaatgatctctctctggaagaggacttttaaaattaagttgtgtgcagttttcctagaaaccatacaagagcagtttctaaggtggtcttggaagatcttaacattgagtatgaatgacaggaaattttagctactacttagattgtgattaggttatcaggcaattatatactttctatattacttttctcttaattttcttattttaaaatcttcgagctaaatttgttaatccattgtatttggttttataaaaagatatagccctaatattggctttgaacagtcagtttaatttataagttgatagtttttcaaggggtgttaacctcaagaatctgtctgtgcttcttagggaattagcaagaaagcggcaaattataactacacggccagtggatcccattggtgtggagctgtttgcatctgagaatctaaagctccatctctattctaacagtgccatcaactggaaagtggaaaattttagttagtctatactttaaaaaaaaaacaaagtttcttttttttttgagatagagtctcgctctgtcgcccaggctggaatgcagtggygcgatcttggcttactgcaagctccgcctccagggttcacaccattctccagcctcagcctcccgaatagctgggactacaggtgcctgccaccacgtccggctaattttttttgtatttttagtagagacggggtttcaccatgttagccaggatggtctcaaactcctgacctcgtgatccgcccgccttggcctcccaaagtgctgggattacaggcgtgagctaccgcaccaggcctttttttttttttttttttttgagagggagtgctgtagtgcagtggcacgaggttggctcactgcactggagtgcagtggagtgcagtgagaggttggctcactgcaacctctgcctcctgggttcaagcgattctcctgcctyagcctccggagtagctgggattacaggcatgcaccaccacacccagctaattttttttgtatttttagtagaggtggggtttcgccctgttggccaggctggtctcgaactcctgacctcgggggatccgcctgcctcagcctcccaaagtgctaggattacaggcgtgagccaccacgcccgtccaaaaaaatctaagattaatctttactatggcaaactagtatgattcacttttcagccaaacagattggtcatatcagttaaaacacttaaaattcttttcccccccacacctttttttttttggctgagcgcaggggactttattcatggtatacaacagggtggggctccctaggcccctccctcttcagggtgtctgcatggacattgtgaggaggggagattctcagtgtggtaggggactgagtgtgggcagggactcccagcagctgagggcctctctcttcctttcatgctgtcgctggggctggtggtccaggggtcttattccttggaggccatgtgggccatgaggtccaccaccatattgctgtagccaaattcgttgtcacaccaggaaatgagcttgacaaggtggttgttgagggcattgccagccccagcatggaagatggaagagtgggtrtcactgttggaggagacaatctggtgctcagtgtagtccaggatgcccttgagggggccctctgacacctgcttcaccaccttcttgatatcatcatatttggcaggtttctccagacggtaggtcaggtccataactgacacattggcaatggggacatggaaggccatgccattgagcttcctgttcagctcggggatgaccttgcccacagccttggcagtgccagtagatgcagggatgatgttctggagagccacacagccctcatgccacagtttcccggaggggccatccacagtcttctgggtggcagtgatagcgtggactgtggtcatgaatccttccatgataccaaagttgtcatagatggctttggccaggggtgctaagcagttggtggtacaggaggcattgctgacgatcttgagactgttgtcatacttctcatggttcatgcctatataaacatgggggcctcagcagaggcagcagagatgatgacccttttggctccctgctgcaagtgagctccagccttctccatggtcgtgaagatactggtgggctccataatgtactcagcaccagcatggccccatttgattttggtgggatctcactcctgaaagatgctgatgggatttccattgatgacaagcttcccattctcagccttgatggtgccatgggatttgccatgggtggaatcatatgggaacatgtagactatgtagttgaggtcaaggraggggtcactgatggtgagaacatctgctttaccagagttaaaagcagccctggtgaccagcgcccgatactgccaaatctttttactttggccttcaccttcaccagggatgtggctagcactgcatgagaagatgcggctgtctcttgaatggcaggagcagggtgccttaagattctgcatgtttacataaacatagccctagaatggtctatttcagtcatttacccactcagcatttccggagtagtatgcttctgtgtgaaacacatggtcaggtacagggaaactgagatgtatgtaacaaagcttctgcccaaaaccgactttcaattacagaaacctaaagattcaaaaccaagactggatgagaaatgctcatatgggtgctawaggagctaaaagaagaacttctaagttgagttgggtgcctggtcaaggcttcccttgagaaaaagccagagacatggtatcacagagagatgtatgagcagggcatgtagcaaggagtggagggagatgacccaaaatagatgtctgctgctttttcatgtatcattttaatgtgttatttcccattagttccaaattccaataaaaatgcattgctatttaaatattgtaaaggtactttgttaagttcttctgcttgtaggatactctagagtctacacagtccttggacacttgctcagtgtaaaacagtttattgcattttttatgctgacatccaagtttgttgcagaaagtggtctgtttttaggctaaagagaaatttaagctcacttctttctttctttttttttttttttttgagacggagtctcgctctgtcgcccaggctcgagtgcagtggcgtgatctcggctcacttcaagctccacctcccaggttcatgccattctcctgcctcagcctcccaagtagctgggactacaggcgcctgccaccacgcctggctaatttttttgtatttttagtagagttggggtttcaccatgttagccaggatggtctctatctcctgacctcgtgatctgcctgcctcggcctcccaaagtgctgggattacaagcgtgagccaccacgcccggcctaagctcacttctttcaaaaagaactctggagataagctcatataaaacattttcttaaacggctcccactgtttatatgatttgatgccccattgagatctccacaggaagcttcaaacacatcttggctcacactttttcagaccaaggttcttgtcttctgatgagactcaccatgtttcagtacttaggaaaagctcgtttagagaacaagtagagaggattgcgtgaagtttatgcagcccctctttcttcttagaaattccagacatttatctatccttggattaagccagatcaccaaaaagaggaattcttggctgacctcatcctgacccctcatgaaacagagtgaagtgcttactgtcttctaccggagcctccagccccagcctcctctgagtgatgttgtaacactcagccctacaaaactccctgttgtatagctgatgtcttcactcagtcactaaacacagtgccctctttacaaagactataggagaaatggctccttggtctcagtgccaggaacaattgttctcatccaagcagtgggtttgctgtgatctttatgctacatgaaccacctacctgatctctgctgctaggaaactgagagacagggcagcaggcttgcctctggcacgggtaccaaactcctcagcttagatttcttcgttggccccacttccgtctttaccttattttgtaagctcttatttttcttctcatttcctctcctactttaggctattgaattatctgagtttttgtaagctactgaaattctttaaggaataaatttggkatataaacatgaattaagtatccttagttactctgtttagaagacaaaacatatacaaattactagttttcacataatgactatactcaatagagctggcattaaaactgctactcttgtgaatataattaaactatacattctgtgcggtcaggggtcttggctaacttggtcacctctgtatctcaagttgctagtgctgtgcttggcatgtagcagatgctcagtaaatatttcctgagcgatttgaacaaacgatctttcagtaactaaagtttaccagtggtacagtctgtggatgctcagaagcaaaatgaaggcctaatgctctggtgtttcctccaccttttttggacacgggtaggggtgtggcaagggacaccgctgacccctctgatgctctgctgtctctctctctctgcagactcacatttcaagacttcctcctggtgcggtggcaggacagtctgtggcaatcgaaggtggggtgtgccgcctggagagcccagtgaactgacccttcaggctgagtgtgaagcgtctcagaggcatttcagaacctgagcttttgggggtttttaactgaagttggttgttttatctttcttgttttataattcctattgcaacctcgtgcactgctcgagacacaagtgctgctgtagttagcgcttagtgacacgcgggcctttggtgggtgagygggactgtgtgtgagtgtgtgcgcgtatgtgcgcacatatgtgtatgtgtggagtatgtgtgtttgcttctccgtggatgaaatagaaactcctcattgtgtgaccaggaatgrttaaatcatctttacaaaatgtgtgctttaactgtttacaagtaaaacctaaagttgcaggaaacattttttatttcgtaaagaggtaccaactgtcgctgatgtgatatgtcagaactgaagagtaaatctacttgtttaaatgacttgacagtggtagtgctccatttaataacagtaataagtaataaagtgtttttatttgttaaccagtttaagtggatcctgtggtaacttaaactgttgttctcatcccttatatggggcatttttctttaacaaagaatggtttcagtgaaacaatctagcagagaattaatgtcagaacctttttaaataatagtctgattgatacagtttgtacttatttcatcaagcttttctaagcttaaatattgcatagcttcgagctgtatggactatattatgaaagaatatgtaaagagaacatacagtaatgcacagtccttaatttgtgtataatggaaagttatttacaatataacactgtaaataagaaagcaaagtttatgggaaaattcaatattatctttgtttttgtttaaatatatttttaagataaaggcacaaaaataaaagaagcgtattactgggtatagtatgtgactcctcttctcagactaataaattatcttttgaatccttggttagagagctattatttattttgtttataaaatgttctcccagaaatcataccattatccatcttgctgttgttctgattgttccaaggccagtgttacgcagttaaagaagacactggcaagatgcaagttgaacttagtacatgattgaatgctcaatatggaagtccctaaaatttctcttgcaatttgataaaaataacaaagagaaagaataagaacactttgctttgaaaaattgtagtggcagctaaaagctcgatagtttcagttgataaattacttctaagtgttatattcagggattctggagccacataagaaaaccaagattttccttttgattttttcttttttttttatgtaagaagtggttatcaagaagatactaaagatagacttgctcagggggaggaagtgccctgcaccatgtaatcatggctctgggcggtaactgataaatcccagataaaattatacacttgacatcaatgtatggccaaattataaaggaaagacaaccaaaatgtagtgggtgtaaatatgaataatttgagagttgctgatttgtattcctggtacaggcaattacatttgtcttgctgtgctctcatagacaggttggtgccgtggtatctgtttctcattcttaatgaggctgagaacttagtgagagatgggctggctggtggggagcctttggcttcaaaagcttttgaagacctgttacctgttggcagagatttttcaggaactggattggatcacataaaactatcaggacactttggagtctgaaaatcgtctgaccagtttcaccaggaatgccacttctttcatctccttttgccctttttccatttatatttaaacatttgagcttgttaaggaccccttttattaagagttcaaaaactggccagtataaaagagcacagcgtctccaagaacagtttgtcaagactttactcttcaattttctacattttttttttaaggaatattgtgaagccaagagggggaacatagtgatattcagaatcatggaggcaaaaatgtaacaggtaatataagttccttccttatcagatcggatattaaagatcagctactggaaccagagaatactgagagatgtaaaatcaacttcatttcacactaaagtagaaaaagtagaaacagatgagaaaataacctcattctctaatctggcttatatcaccaagaatctgaagctgtattttaaggtgcccacttttaacatggatgcttttaactgtgtgcctatatttgatttctttgtaaggtctgagtgttggatatctggttctcttgagtagaattaagcctggtctggattcctcaaggtggtcactgtgacctagctctggatttggaaacaggggcatcttcagggcttggtgaggagacaagagcatgtgattttgcttaaggcacctggagtgcctgtgctgattggactgtcttgtcagctctgccactgttttctctgccttcagtatgtctgcctatggcaggccctttcttaccttctaattaccatgtctaaatgtgaacttgatgtggagaaaggaaaacaattatactctgctggtggcaatgtaaattacgtcagccactgtggaaagcagcctggagatttctcaaagaacttaaaatggaactaccattcaacccaataatcccattactaggtatatacctaaagaaatacaaggcattctactgtaaagacacatgcatgcatatgtttactgcagcactattcacaatagcaaagacatggaatcaacctagatgcccatcagcagtgaactagataaagaaaatgtggtacatatacaccatggaatactatgcagccataaaaaagaatgaaatcagccaggcacattggctcacacctgtaatcccagcactttgggagaccaaggtgggtggatcacctgaggtcaggagttggcctggccaacatggtgaaaccccatctctactaaaaaatacaaaaattaagctgggcgtggtggtgggtgcctgtaatcccaactaattgggaggctgaggcaagagaatcacttgaaccagggaggcggaggttgcagtgagccgagatcacgccattgcactccagcctaggtgacgagagtgaaactccatctcaaaaaaaaaaaaaaaaaaaaaaaaaatgaaatcatgtcctctctggcaacatgaatggaactggaggccattatcctaagcagaaaatcaaataatgcatgttctcaattataagtgggagctaaacactgagttcacacggacacaaagaagggaacaatcgataccaagacctacttgagagtggagggtgagaggaaggtaagaattgaaaaaccacctatcgggtcctatgctgattaactgggtgatacaattatccgtaaaccaaacccccacaacattctacccatgtaacaaacctgcacacgtaccccctgaacctaaaatagaagttggaaagacagaaaattaatgtgaaattgaatttggatatcaatatgttagaattttttttacaaagtatgtataaataagtcctagatgctagtctgaggggcttgtctgtgagcaaagtgaatgaattttggtttacgggtatgaggacatctctcggggctactcaaaagccttttttgcataatttccagttttctcccacatttgagagtggtaatattgcataccagtgacctgcagacaagtgaggtcactctgttttgacactggatggaaggagggaagaaggaagggagggaatgaagaagagaagatttagaaaagagcatcattcttgaatcttgagattgtattaataattgtgggatcttttattttttgatttggccatttttattacaaaggtagtctgcttattaggaaaaaaattagaaaatagataaggaaaattttaaaaatgtaaattttaaataaaaatttagctcataatcctacttccctagaggcaacccttaataaacaccctacagactctttatgcatgaattttctgtgtgtttttaacacaaaaaatggtgctatattgaactcccaaaatggggttctatagcctgcagttttcatttaataatatcacaaaaagatgaccagacctataggtttacacaatccctcatttactgctttcccatacaatgctggctcagcctaatgatgcccagtacatatatttgttccttaaacttctggggaaatctatgacaatgctgagcagaatagctgatatccatattttcaggctgcaggtgcatacaacaagcactgtggtaaggtctcagccaatgaaagccagcctggaaggcatcctagagcaggccatggtcattgctcttgaacctcactgttttagtatcccccacacaactttgacaggctttttccagaacgatggaaagctattctgtctctgggtgctgtaggccacaagtgccagggaatcagcactccctagaagttggtgtataaattggctagctcctttgctacttgggtgcgataataccgaatatgtgtttcgcagtttttgagagagttcctacaggaattaagcttcagtttccccctctggtagttgacttagtacaccttgtgttggctttctccccttttctggttccttcttgactctcctacctgtgtttactgaaatcatctcccagatgaactacttggagtcaactccttatctcagggttgcttctggaggacttcacactgaaacacattccactccacatgtattcttggccactagggtttttaggccctccactgagggtggactcaccagtctgcttatgcccctcactggggctctcctcctgacatgtgcacctgctcagccattttcatccgtaacatcggagggacattctccgagtgataaggctggatatgccacaaaagtttgtgaagttcgcaactaagtcagtgttaacaggcaccagactgctggagacagacaaacacttttaaggatatggtgaagtaaacagaagctgaagagcaacagttcatcaaggactggtggatgccttcaaggaaatgacctggaatggtgttaacggtagttggaagaagctttagctaaaggcgtttcatgactttaagaaatttgcagaggccagaacagtgtcctgtgtcacgaacacattttcacgacgtgcatgccatgggggcctcacacaacacccatttccaaaagggcatctctcaagtctggctgttcataacataatttcatggtaaatttttcttaatgtcttccaaaatttttcttaaaactaaatgtttaaggcacatcagcattgttctgacataaatcctataaacgctcaacactgggagtcccctctgcccgcaaaacccagtcttcctgttcaccttaaggttgcagtggctggtgaccttcagagggaacagaggtggaagccactccccctcccaggaacgctggcccaagacaaggctgagcccagcagcaatgaatccctgtgtatatgattaatgtgtatgattaagttgttttcatttagttgtattctaaacctttcccagaagccgattaaccaggggaaggaagtatgagtaggtaaatgtagtgggctatagggggagtgaatgggaggttggaaacataaagttaataatatcacattaatatttgttctggggccttaagaattcttaaggaacacaccacccctccccagcacttaatttgcattcaagtccgcaaggtattagccagatgtctatgatcagaaactcacaggctgaccaaattgaccaggcaatcttttttttttcccccatgcttctgtctctaaagtgtttggccacaggaaggattaaatctaaaactggcaagggcttccctccaaggcggcacactcagcttccagaagaccatcagccaagcccaaggtggttcattatgaccagttgtggaaagctgggagagaaagtgagtccagtggtttctcctttacatggtgcagttactgaagccctgaaaccacaagtggcaatgcagaaaaactttgtgggtgggagtttctttgccttgaattgccatggggatttctttgtcaacagagtgtcagaagcctaaaagaaaaaaattcaaaacaattcctttaacctttactgtcgctattatgatggagatccaaagagttactcctaaaatgatctttcctggccttggaaaatccagtaatgcttaagaggtagaggatatcttccaatatattaagaaaaacatgtgttcttttccatgtacaagtagtaagattttaatctttccacccaggttcttcccccaaacctgttaactagcagtctttcccacctggtaaatggtagctccatccttctgtgcactcaggccaaaactctgggggtcatctgtttcatgttctatggctgaataacaaatcaccccaagccttaatggcttaaacaacaactgttttatttgcccacaattctgtaaattgagcttaacgtaactcagtggtttttctgctgctcttgctgctagtcactagtgtgctgcatttagctggaaggtgagctaggagataggccgagctgggatgctggatggctgagtgtccttcttactccatgcaggctcagagcctctctacagcatctttccacaccacatgccaaaaagacacggcaggtcaagcttcccaggagcacaaaagcagaaactaccaggccttctacaggtttaggtccataatggcccagcatcacttttgccacatttattgcttatattaaatcacctggttcagcccagattcaagagggagggacagcctaagggcatttgtagcagaggctagattcactgagggccaccacctgacatccttgaatttttactttccttctgtgattctac

SEQ ID NO: 95874 - DNA, 13018 bp, Homo sapiens
gagaaaactggaaattatgcaaaaaaggcttttgagtagccccgagagatgtcctcatacccgtaaaccaaaattcattcactttgctcacagacaagcccctcagactagcatctaggacttatttatacatactttgtaaaaaaaattctaacatattgatatccaaattcaatttcacattaattttctgtctttccaacttctattttaggttcagggggtacgtgtgcaggtttgttacatgggtagaatgttgtgggggtttggtttacggataattgtatcacccagttaatcagcataggacccgataggtggtttttcaattcttaccttcctctcaccctccactctcaagtaggtcttggtatcgattgttcccttctttgtgtccgtgtgaactcagtgtttagctcccacttataattgagaacatgcattatttgattttctgcttaggataatggcctccagttccattcatgttgccagagaggacatgatttcattttttttttttttttttttttttttgagatggagtttcactctcgtcacctaggctggagtgcaatggcgtgatctcggctcactgcaacctccgcctccctggttcaagtgattctcttgcctcagcctcccaattagttgggattacaggcacccaccaccacgcccagcttaatttttgtattttttagtagagatggggtttcaccatgttggccaggccaactcctgacctcaggtgatccacccaccttggtctcccaaagtgctgggattacaggtgtgagccaatgtgcctggctgatttcattcttttttatggctgcatagtattccatggtgtatatgtaccacattttctttatctagttcactgctgatgggcatctaggttgattccatgtctttgctattgtgaatagtgctgcagtaaacatatgcatgcatgtgtctttacagtagaatgccttgtatttctttaggtatatacctagtaatgggattattgggttgaatggtagttccattttaagttctttgagaaatctccaggctgctttccacagtggctgacgtaatttacattgccaccagcagagtataattgttttcctttctccacatcaagttcacatttagacatggtaattagaaggtaagaaagggcctgccataggcagacatactgaaggcagagaaaacagtggcagagctgacaagacagtccaatcagcacaggcactccaggtgccttaagcaaaatcacatgctcttgtctcctcaccaagccctgaagatgcccctgtttccaaatccagagctaggtcacagtgaccaccttgaggaatccagaccaggcttaattctactcaagagaaccagatatccaacactcagaccttacaaagaaatcaaatataggcacacagttaaaagcatccatgttaaaagtgggcaccttaaaatacagcttcagattcttggtgatataagccagattagagaatgaggttattttctcatctgtttctactttttctactttagtgtgaaatgaagttgattttacatctctcagtattctctggttccagtagctgatctttaatatccgatctgataaggaaggaacttatattacctgttacatttttgcctccatgattctgaatatcactatgttccccctcttggcttcacaatattccttaaaaaaaaaatgtagaaaattgaagagtaaagtcttgacaaactgttcttggagacgctgtgctcttttatactggccagtttttgaactcttaataaaaggggtccttaacaagctcaaatgtttaaatataaatggaaaaagggcaaaaggagatgaaagaagtggcattcctggtgaaactggtcagacgattttcagactccaaagtgtcctgatagttttatgtgatccaatccagttcctgaaaaatctctgccaacaggtaacaggtcttcaaaagcttttgaagccaaaggctccccaccagccagcccatctctcactaagttctcagcctcattaagaatgagaaacagataccacggcaccaacctgtctatgagagcacagcaagacaaatgtaattgcctgtaccaggaatacaaatcagcaactctcaaattattcatatttacacccactayattttggttgtctttcctttataatttggccatacattgatgtcaagtgtataattttatctgggatttatcagttaccgcccagagccatgattacatggtgcagggcacttcctccccctgagcaagtctatctttagtatcttcttgataaccacttcttacataaaaaaaaaagaaaaaatcaaaaggaaaatcttggttttcttatgtggctccagaatccctgaatataacacttagaagtaatttatcaactgaaactatcgagcttttagctgccactacaatttttcaaagcaaagtgttcttattctttctctttgttatttttatcaaattgcaagagaaattttagggacttccatattgagcattcaatcatgtactaagttcaacttgcatcttgccagtgtcttctttaactgcgtaacactggccttggaacaatcagaacaacagcaagatggataatggtatgatttctgggagaacattttataaacaaaataaataatagctctctaaccaaggattcaaaagataatttattagtctgagaagaggagtcacatactatacccagtaatacgcttcttttatttttgtgcctttatcttaaaaatatatttaaacaaaaacaaagataatattgaattttcccataaactttgctttcttatttacagtgttatattgtaaataactttccattatacacaaattaaggactgtgcattactgtatgttctctttacatattctttcataatatagtccatacagctcgaagctatgcaatatttaagcttagaaaagcttgatgaaataagtacaaactgtatcaatcagactattatttaaaaaggttctgacattaattctctgctagattgtttcactgaaaccattctttgttaaagaaaaatgccccatataagggatgagaacaacagtttaagttaccacaggatccacttaaactggttaacaaataaaaacactttattacttattactgttattaaatggagcactaccactgtcaagtcatttaaacaagtagatttactcttcagttctgacatatcacatcagcgacagttggtacctctttacgaaataaaaaatgtttcctgcaactttaggttttacttgtaaacagttaaagcacacattttgtaaagatgatttaaccattcctggtcacacaatgaggagtttctatttcatccacggagaagcaaacacacatactccacacatacacatatgtgcgcacatacgcgcacacactcacacacagtcccrctcacccaccaaaggcccgcgtgtcactaagcgctaactacagcagcacttgtgtctcgagcagtgcacgaggttgcaataggaattataaaacaagaaagataaaacaaccaacttcagttaaaaacccccaaaagctcaggttctgaaatgcctctgagacgcttcacactcagcctgaagggtcagttcactgggctctccaggcggcacaccccaccttcgattgccacagactgtcctgccaccgcaccaggaggaagtcttgaaatgtgagtctgcagagagagagagacagcagagcatcagaggggtcagcggtgtcccttgccacacccctacccgtgtccaaaaaaggtggaggaaacaccagagcattaggccttcattttgcttctgagcatccacagactgtaccactggtaaactttagttactgaaagatcgtttgttcaaatcgctcaggaaatatttactgagcatctgctacatgccaagcacagcactagcaacttgagatacagaggtgaccaagttagccaagacccctgaccgcacagaatgtatagtttaattatattcacaagagtagcagttttaatgccagctctattgagtatagtcattatgtgaaaactagtaatttgtatatgttttgtcttctaaacagagtaactaaggatacttaattcatgtttatatcccaaatttattccttaaagaatttcagtagcttacaaaaactcagataattcaatagcctaaagtaggagaggaaatgagaagaaaaataagagcttacaaaataaggtaaagacggaagtggggccaacgaagaaatctaagctgaggagtttggtacccgtgccagaggcaagcctgctgccctgtctctcagtttcctagcagcagagatcaggtaggtggttcatgtagcataaagatcacagcaaacccactgcttggatgagaacaattgttcctggcactgagaccaaggagccatttctcctatagtctttgtaaagagggcactgtgtttagtgactgagtgaagacatcagctatacaacagggagttttgtagggctgagtgttacaacatcactcagaggaggctggggctggaggctccggtagaagacagtaagcacttcactctgtttcatgaggggtcaggatgaggtcagccaagaattcctctttttggtgatctggcttaatccaaggatagataaatgtctggaatttctaagaagaaagaggggctgcataaacttcacgcaatcctctctacttgttctctaaacgagcttttcctaagtactgaaacatggtgagtctcatcagaagacaagaaccttggtctgaaaaagtgtgagccaagatgtgtttgaagcttcctgtggagatctcaatggggcatcaaatcatataaacagtgggagccgtttaagaaaatgttttatatgagcttatctccagagttctttttgaaagaagtgagcttaggccgggcgtggtggctcacgcttgtaatcccagcactttgggaggccgaggcaggcagatcacgaggtcaggagatagagaccatcctggctaacatggtgaaaccccaactctactaaaaatacaaaaaaattagccaggcgtggtggcaggcgcctgtagtcccagctacttgggaggctgaggcaggagaatggcatgaacctgggaggtggagcttgaagtgagccgagatcacgccactgcactcgagcctgggcgacagagcgagactccgtctcaaaaaaaaaaaaaaaaagaaagaaagaagtgagcttaaatttctctttagcctaaaaacagaccactttctgcaacaaacttggatgtcagcataaaaaatgcaataaactgttttacactgagcaagtgtccaaggactgtgtagactctagagtatcctacaagcagaagaacttaacaaagtacctttacaatatttaaatagcaatgcatttttattggaatttggaactaatgggaaataacacattaaaatgatacatgaaaaagcagcagacatctattttgggtcatctccctccactccttgctacatgccctgctcatacatctctctgtgataccatgtctctggctttttctcaagggaagccttgaccaggcacccaactcaacttagaagttcttcttttagctcctatagcacccatatgagcatttctcatccagtcttggttttgaatctttaggtttctgtaattgaaagtcggttttgggcagaagctttgttacatacatctcagtttccctgtacctgaccatgtgtttcacacagaagcatactactccggaaatgctgagtgggtaaatgactgaaatagaccattctagggctatgtttatgtaaacatgcagaatcttaaggcaccctgctcctgccattcaagagacagccgcatcttctcatgcagtgctagccacatccctggtgaaggtgaaggccaaagtaaaaagatttggcagtatcgggcgctggtcaccagggctgcttttaactctggtaaagcagatgttctcaccatcagtgacccctyccttgacctcaactacatagtctacatgttcccatatgattccacccatggcaaatcccatggcaccatcaaggctgagaatgggaagcttgtcatcaatggaaatcccatcagcatctttcaggagtgagatcccaccaaaatcaaatggggccatgctggtgctgagtacattatggagcccaccagtatcttcacgaccatggagaaggctggagctcacttgcagcagggagccaaaagggtcatcatctctgctgcctctgctgaggcccccatgtttatataggcatgaaccatgagaagtatgacaacagtctcaagatcgtcagcaatgcctcctgtaccaccaactgcttagcacccctggccaaagccatctatgacaactttggtatcatggaaggattcatgaccacagtccacgctatcactgccacccagaagactgtggatggcccctccgggaaactgtggcatgagggctgtgtggctctccagaacatcatccctgcatctactggcactgccaaggctgtgggcaaggtcatccccgagctgaacaggaagctcaatggcatggccttccatgtccccattgccaatgtgtcagttatggacctgacctaccgtctggagaaacctgccaaatatgatgatatcaagaaggtggtgaagcaggtgtcagagggccccctcaagggcatcctggactacactgagcaccagattgtctcctccaacagtgayacccactcttccatcttccatgctggggctggcaatgccctcaacaaccaccttgtcaagctcatttcctggtgtgacaacgaatttggctacagcaatatggtggtggacctcatggcccacatggcctccaaggaataagacccctggaccaccagccccagcgacagcatgaaaggaagagagaggccctcagctgctgggagtccctgcccacactcagtcccctaccacactgagaatctcccctcctcacaatgtccatgcagacaccctgaagagggaggggcctagggagccccaccctgttgtataccatgaataaagtcccctgcgctcagccaaaaaaaaaaaggtgtgggggggaaaagaattttaagtgttttaactgatatgaccaatctgtttggctgaaaagtgaatcatactagtttgccatagtaaagattaatcttagatttttttggacgggcgtggtggctcacgcctgtaatcctagcactttgggaggctgaggcaggcggatcccccgaggtcaggagttcgagaccagcctggccaacagggcgaaaccccacctctactaaaaatacaaaaaaaattagctgggtgtggtggtgcatgcctgtaatcccagctactccggaggctgaggcaggagaatcgcttgaacccaggaggcagaggttgcagtgagccaacctctcactgcactccactgcactccagtgcagtgagccaacctcgtgccactgcactacagcactccctctcaaaaaaaaaaaaaaaaaaaaaggcctggtgcggtagctcacgcctgtaatcccagcactttgggaggccaaggcgggcggatcacgaggtcaggagtttgagaccatcctggctaacatggtgaaaccccgtctctactaaaaatacaaaaaaaattagccggacgtggtggcaggcacctgtagtcccagctattcgggaggctgaggctggagaatggtgtgaaccctggaggcggagcttgcagtaagccaagatcgcgccactgcattccagcctgggcgacagagcgagactctatctcaaaaaaaaaagaaactttgttttttttttaaagtatagactaactaaaattttccactttccagttgatggcactgttagaatagagatggagctttagattctcagatgcaaacagctccacaccaatgggatccactggccgtgtagttataatttgccgctttcttgctaattccctaagaagcacagacagattcttgaggttaacaccccttgaaaaactatcaacttataaattaaactgactgttcaaagccaatattagggctatatctttttataaaaccaaatacaatggattaacaaatttagctcgaagattttaaaataagaaaattaagagaaaagtaatatagaaagtatataattgcctgataacctaatcacaatctaagtagtagctaaaatttcctgtcattcatactcaatgttaagatcttccaagaccaccttagaaactgctcttgtatggtttctaggaaaactgcacacaacttaattttaaaagtcctcttccagagagagatcattggaggcatgagcaacttaaacagcagtcaaatgggggcccttgagtcttgtccatttgttgtatagtgctgcattaataacattctgacaaatccagcacaaggaggaacatgaaaaacactagggtaaagttgtttgcatgggcattttccttcctggaaagcaggactctagcctcctgagacaagtgtgttcagctcaattttatgttaccacgtgcttttgaagaaacagatatctgtttccaccactttcccttctcctgttaattcttacttatttttcaaattgctgagtcatagaaaacatctaatttttcatgcactaacaatgtcacatgaactttaatataatctggaatactgtgtatagtttatagaataaaaatccatttaacaacaagttaagcttctcttctgtatttatcactacttgggcaatgtaaatatggtatatggtactgtgagactgtattgtgaactgggtagtaccttacatccttgcattgtgaattcttgcctgacatgataatagtcaccctcagctttcttttttttttttttttcttttttcttgagacgcagtctcactctgtcacccaggctggagtgcagtggcgcgatctcagctcactgcaacctccacccaccaggttcaagagattctcctgcctcagtctcctgggtagctgggactataggcgcgtgccactacacctggctaattttttttttttttagtagagatggggtttcaccatgttagccaggatggtctcgatctcctgacctcatgatccgcctgccttggcctcccaaagtgctgattacaggcatgagccactgcgcccggccaccctcagctgtcttttagtgccacaaacgtgatacaccttaaatgactaagtccagagagaaaggcaagagaagggctggggaagtgtgtctggttggtttttattgccttgtttctattgtgggcttttacatttttttctctcttaatgagttgactcaggagacactgccacccacccctatccttttcccagaagttccctacccatcgctttttaagagctgtctttcaaaaagacacaatttgtgaataactatattctaagcattctttgtgtgcagcattaaaccttggaatgtagttaactgctctaaaaatagagtttggtcgtcagacttcatcctgaaagcagatgtactcaactagctgacagtttcacatgaaccttcttaatatagtctagaataatgtgtatattttatagaataaaaatccattaactatgggtgaaaagatctgggtgcccacttactaagcctgtgtgatattggacaacggaaaatgaagactgggttagatggtctctagagcatcctttcagagtttggacaatctctgatgctgacttcatttagcttgtgtatacattgttaatgaatcaaaaaaaagtatttacttctattttctcattgtcttaaattaaaagtattaaataggccagagcaatttgaagatacaattcccgagttcagccaaccaatcagaaatatcaacagaatgagaaaggattgccatatgttatttatcttactgtgtgtcgctcatacctcattctccacgttgaaaacaaggatgccagatgaaacacaaagatgacattcgggtaaatttcattgttagcactgaaacagggatatatacagggcaaaaagttctattgttctcacatacaaatatcatgtctaaggagccttaaaataagattaaaatgctgtctgatgagaacagcatattcttccagcctacaggccactttggttcttactatcaccaggctcactgacaccacacttcagtcagaggcaacatcagacaagagttccctcctatttttaggttaaaagcccagtgaagatactcacataaacatggcaagccccacagtaactattatttcaccactcacatggagaattatcatgaatattccctcttgctacaggtgataaaagtgctccattatttaacaaatatttattctgcaagttattatgggggaacagaagaatgaaacatggatctcgctctaagtgcaattatgtctttgcaggatgcagaaactagttctttgtgaaatcttaacaataagtccctatatttgcataatgctttagtttccatagcacttttgcatcaatgagatccctcaaaataccatgtcagacagaaagatgtatactatacctatttttttcagatgaaaaaaaaaatgagacagaatgataatgtggtttgcttatggtcagaraggaagtggaaaaattgagatgtgaatgaaagcctctgaactccaaatttagggctatcttgactccccctgaagacttaccatgaaggaggattctaaatctggctctgttaagagacatgcctttaactgcaggaggttttcagggtgaatcagagcttgctcaggaaagctactggaacaaatcttaccaacaaatttcaagatgattctgggactcagagaaatcggtttgagcctcaactctgctgttgatagattggatagtttctggatcgggaaatcactggctctctgggtttcaatgtctttttcggtaaaagtgaaaaacttcaactcaattatattcagagttctttctgattttgacgttctacggagttttactactgagggtttcccttcaggtctgtaaggggaggctatgggtcaccatttccttggtcaagacagcccaagggaactgtcttttcctcttcatagggaacctggcctcaacatcctgatgatttgtactaggtgaaacccaaaatgtcatttatggtcttctggttggtaagctgccagataacatgaatcttactatagtttgaaaagagcatcttctatttgaaaagaaatgaaaggctaacacttaaactatcattaagaatgaggctactctccatttgtgtaatggacaatttcctgagaatctcagttaatctgtcagtgaggaattttggaggggaaaaatacaaaccaccaacaactgatttgaagaaagttctctttgtcaaaatcttgtgcttcctgacttactgatccgacccatgcccccaaagaactgttaaggcacggagacccagaaagcagcatttctcaagctgacttctgctgggtcctggcaggtgctctctctttaaaaaaaaaaaagcggggggcagtgcgggagcatgggcaaaagctgcaagtgtattgctccaccttgttctacccttcttagagccagacaggcacatgagcacagaaaggttcagacatcctgcattcaaaagacctgtgtgactctgtcaaagttagttcatcccaaatgtcaaggaatgccttcctttaatactagctgtacctggaactactacaaaaaatatgctgaaactttccttttattttactccaaaacgtaacctcactttcctttgctgattcttcctcatctccccagcaactaaatgttggaatgtccaaagactcaacagttagactacttttcttccactcattttaaagaaaaatgtctatgaagtgttttggatataaagtgaagcagctggttgcactggaaattgaggtaagaataataactccatagatcaacctcctcctccagtcgccactccatttctttacttccatttacagcaaagttatttgaaagagttctctacacctattacctcaaattctttccttccattttctctttaagccctctataatcagctttttgctttcacctctccaccaaaacccctctttatcaaaataagaaatgacttccaatgccaaatccaatagcctgtcctcaaatctaatttcacaaggcccagcagcagcatctgataaagttgatcacctgcttctccttgaaacacccttttcccttgttttttaggacaccactctcacctggttctcctctgacctctatgattataacttttcagtctccctggttgcttccccaacttataagtacaaaatttccccaggaatcttttctcctgtctgtgttcacctccttggtgatctcatccaaatgttttttaaaaaaatgtttatatgctgagattccctaatatgtatctccatcttagtcctttctcctaaactccagacacacatatccagctaccttttgggcctccccatttgatgcctaacaggcatcttgaaattaacatgtccagaactgagtttctgctacttcccctcaagtcttttcccccaacttcaccttcttcctcaccctagtaaatggcaattctattcttctgtttaggccaaaatcttaagagtcatcattgccttttctatttccctcatatctctatccaacccaacagcaaatcccattggctctatcttaaaatacacacagaagccaactacttctcaccacctgtgtggataatgctctagtccaagtcattattatcactcacctctatggcaacaacct

SEQ ID NO: 95875 - DNA, 51107 bp, Homo sapiens
  misc_feature (1)...(51107): n = A,T,C or G
cttctccaagcatgatggccacaggtcagtcctctttctgtgcctggcatatctggtacttaaaattctgtccaaatgtagaccatgggttcatctggagttccttgtccgtgggaacacagtgttctattctactctgaggacaacaaaccgaaggccttaaacgatggggatggatgatcccgcctctgtaggggcatggctgctattatctggaaattaggaattggatgcatcattcctgtgtgttacagtattattttaattggcctcaatggttgcagcaatcagagtcccagcgtttgtactcacagacaaggcaaaggtaccagcttttctgtttctttgaacctactgcaaaccaagaataactcatgaggtggtaccaaagatgaaagcccagacttcagtaatcttttgaaccagacgtggatggtgctgaattgttgcttggatggaaaaagggctgcccatgttgtgctacactatgctaaaactgtaatttagtaagaccttgggctgcctcttctgtcttaactggttctgcagcttgtccttttgcccacatagggcctatttcatgtactgttagttttctctggggactctttaactttagagccatttctttttcttcaaactgatgaacttttgtttgaaaggcataaggagtgaaaagctccttgaaaatccaggcgggtatggaaaggtgctgctacccatatctttttgactttctttgtttcatgactttaactcatggcatctcctttgtagtaaaaggagacagaccattaatttcagcatttctttgtgatttataagtactgagcatgaagtacttgtctgcccctcatttcaaggccagagttattttctatttatgtattagtctaggctgatcttttagggcacaatagaaaccatggggcgtggagcatgagttgtgaatggcagggatcattctgggtaaaaaaaacctagaatcatttctgatgtgcaacattgtcaagtgaagaagctaacagttcaactaccgagattatttgataacctgggttttctcattcatccatcaagcaccatcaaccagtcagccattattatttatatatgtattaccaaaagcagtctatctgcctgtgacctccaatgtacactgccaaacacaagagtaggacacatctgttctgggttcttgacctatctgtctccaattcatctccccttttcagccatttcaacaaactactctttggagctctgagatgacatcttgttgttttatatagatgtatcttttaaaaatagttcacgtttggagaattcttttgtactcatttgctttttgtctgagaaccatgtctatttttataactggagtgtgagttctgtatcttctcacattctgtatactgtatccattttctagagaacccagtagcttttatacagtctcttcttaccaccccttgtggtttcagaacaagctttattttattacgagtatattaatgacaactaattcctgttccaattctacctgttttagttgtgaaggtagttttgtgtaatccagttgattgctcctctggcagagagaaggagctcaaaagatacttgatgtctttcatgtaagtttacctggtcttttcctattgaagaatttttcatcagaaacgactgggaaagtttgggaaagtcagcaaaagaaagaatgcatttcgaaagcaaacagaagaaaaaagtatattctcacagtttttccccaggaagtctggagaaaaagtcctcatgtcaccaatttctctgttgcatgaattttagtgttttgctataagacagcatgagggctatcaggccaaaattcattattgtatttccaatacagtttgtcttgaatgtctgtctcttaaaccagtttttacttgtcagttttctctcagcaaacagtcttactattatgtggaatttaacttttcagagaaaatttccaaagtcctctaccttatttggcttttatctgtgtcttttggaaaaggagctgcatggcctcagtgcctccataaaaagcttaagttgagttcatgggagaacattaagatcgttttttttcccttttagctcggtaatctcatgtaccacaggtaatgaccaagcatctctgctagaggatgtaactctcataactcctgtgtaaaatgaggatcctgttggtgatcctcattccagtttccaaagcgagaggagccttctgagcagaagtatgcaagactgattctgtttggaacagtttcctatttggctgcattctaggaggcctcctgacttattcatagtattgtcgcctggtggcattggtgtggsgtagcttgtcctgctacttgctaaagttctctttctttgagaaaactgaggaaccagaatgcttagagttcataaaataatctctaaaccatgttaggttaaaacaaaatgaccatctcacaaaaacgagtttagttgaatgctcaattccttacaaaatcttcatttaaggctgagtgtggtggctcatgcctgtaattccagcactttgggaggccgaggcaggaagactgcttgagcccaggagttcaagaccagcctgggcaacataggaagactctgtctctacatagaaattttattataaaagtagctggggatggtggcacacacctgtagtcccagctactcaggaggttgaggtgggaagattgcttgagcccaggagtttgaggttgcagtgagctgatcatgccactgcactctagcctaggctacagagcaggaccccatctccaaaaaaaaaaaaaaaaaaagtcatttaaaaactgaagaatgttctcttcttgctcagttccctaaattagctggggggattgggatactttacaatttttacatttttaaatttgaagaatttgttttaaacttacttggtaatggcacttctacttactgaccaacttttcagctctttttgaccaggatggttgcaaattagggaaaatatctttatactatacatccaattcaagaggactttaattacttaaaagcatttaggtcataattaaaattattttcactgtttccataaaataagcattatgattgcacactccttctactgtctgaatttatgtragaggtatagcttgcttaaaatacatatatatgtaaagttatattttcttagaaacatggatgtttacagccattgctttcaaagagattattacygtgtattctccctgttttacaatatgttttcatgaagactatgttacaccagaggcttctgattatcaaagtgataaccagttttaactgcyggtatgtaccagatttgtgaactaatttaaaaaaccacaaactatgaataaaatggggtttgcaaactaaatatcattaatgattttcacttgcgtttactgatgagattaatcaataaagccatttacatttagtgaaagcaaatttcctcaagtgatctccctggtagcatgtttactcactatgtggagtggagataagaattactttattgctacagatattttacaattagtatttctaygtaagcacataggctattatcaaggacaatttatttagcacttattttgaaattatatgtaaacatgcaaacaaataagaacccaagagtataaactctatgacaaaagtcagtatgcaagcattaagaactctttcagaaatgtgtatttaaaatgaccagaattcccagatcatttgaaagctgcctcttaaatgcctcttatcaattcatcttaaatgtttgctatattaaattctttatccctgagtgccttcatttgacttccaattacgtattttcaactattaattggctatcccattatgttaaaattaaatatgtacataactcaaaatctttcactaccaactaatttctgtttctctcaatatcagtgatatcaccattctcttaagtatctctatttcaaacctttgagtcttgagtctccttttccataatttcctttatccagtctgtttagtggaattcaagcttgttctctcaggactgatttgagaaacctaagcattcctagcccacctctggggtaagctcgccatctctggactgtttgagctatgcattcctataatttaactacacttaagtcaaaagtatattcaagacacaaactcgctattctttgaaaaatgcaaaacagggtttaagcaagcatacctaagtgcacaacagatccggaagatcacctcatactttataccaaagtctaatttagatccagttattaagttcaaatgcagcaaaagcagcaagatattttagccaactcaaaaacatttttataataatttataagtcctgggcgggcatggtggctcgcgcctgtaatctcagcactttgggaggccgaggcaggtggatcacctgaagtcaggagtttgagaccagcatgactaacatggtgaaaccccgtatctactaaaaacacaaaattagctgggcatggtggcacgtgcctgtaatcccagcactcgggaggctgaggcaggagaatcgcttgaacctgggaggtggaggttgcagtgagccgggatcatgccactgcactccagcctgggcgacagagtgagactccatccccaaataatagtaataagtcctttcagtaattacaattattctttcattgcttcttccaattgttaattcataagttgtacataattgtaacaatataattgctctcttcatattatttaaaatatgccttttcattcaatctagaaattttatatttctcaattatattgcttacatattattctgatagacagctgtacctgcttaaacattccaatttaagtaggcatgaaatagtacatccaatctgttttagttttccaaattaattgttagcaagattagcccccatttttttttttttttaacagatgggagtctcattatgttgcccaggctggtctcaaactcttgggctcaagtgattcccccacctcagcctctcaagcattgctgggactacaggcatgcaccaccgctcctggctaaaatcttgttttaagtttcttccctccaacttcctcttgcgttcttggtgttctctaaccatctctacaggggggaggtggtgatacacagcacatgcttcctccttatctaatgtcaccttcagttcagaaacgatatgttttctaattaaaagacaactttacaagagaagcgtgcctaacaaaatgtgtagatgactttttattcattgattcaaaagacatacattcagcccccgctatttactggatattaagctctggggctacatggaaggaccacgcagacactcttcatgccttcaacggcttacagttaagtttttcaaacatttgaaacataacgaagcttttggttacttaaaagaattctatggtattagggagcaacacctgttttgtaaacctatatcttcatacagggaatatgcttaatcttgctacagtatacatgaatgcgggaatgtatcttcctctgggctgcctttcgttaccacttggctgggtggaacacctgttcactccactttccacttgggctacaaacctgaaacgaaatctttgcaaccagtacagcctgcgcggggcgcggcccagtccatcccccttcggatgcgcagaagcagaggtcaccacgccggacccctcgattccctcgcgggcgattcctggctccttcaccaccccagcactccaagacccccgccctttggcctgaggctcccactgccctagccagttcccgggctcacttccagcttttccagaaagcttggccacgcccctcggcccagactctcaggccactcggccgcaattaacccgcgtctctgcgcctttttaggcccctccccctcggtcgtgcccttgtcatctcttaggccccgtctcaccctttcggatgcctcccctagaaccctaccactttccacccctttccgtctgttatttctcccaaacttgcgcccgcacaggcccctctggaacactcctgccccgtagtgcccctcgtccccgctccgtagagaaagagcgtgcgtgccgcgcatttctggcctggggagcgggtggagtaaacctgcgggaaccattttacgacaacgtgcggctgtgcggtgtggctgacggcaacgccgctgctcttggagaggtcactccggagacggcgttggttttggggtgtggggggttggtggcactatgtggcgcgtctgtgcgcgacgggctcagaatgtagccccatgggcgggactcgaggctcggtggacggccttgcaggaggtacccggaactccacgagtgacctcgcgatctggcccggctcccgytcgtcgcaacagcgtgactacagggtatggcggggtccgggcactgtgcggctggacccccagttctggggccacgccgcggaaccgcttactgctgcagcttttggggtcgcccggccgccgctattacagtcttcccccgcatcagaaggtgagccctagaccccccttctcgggaccccgttgtccttcagagctgactggatgcctgcaagatcctccttgagaggcctcactgatcctccacccattcccagtatctgctttggccctttgtccaatagttggctttgctgtagctccttagtgtccctctcatgatctatttcattgaaaggagagcttcaagactggggctgtatgcagaatatctgccgaggttcatgctttgtcagacccacaggactgtggaggagaaagcctgtcactggaaattactaacttctcatggacaggaactcccttggcatccctagytcccaatgtgcaatggaactgtatacactttgcatgaaattgaattgaatgaaatcttaagccagactgagagttaggtagtccttaaaaattttaawgtttcttcttttccttttccaggttccattgccttytytttcccccacaatgcaggcaggcaccatagcccgttgggaaaaaaaagagggggacmaaatcaatgaaggtgacctaattgcagaggtaagtttttttttttttttttaattwatttatttattttttttattgatcattcttgggtgtttctcgcagagggggatttggcagggtcataggacaatagtggagggaaggtcagcagataaacaagtgaacaaaggtctctggttttcctaggcagaggatcctgcggccttccgcagtgtttgtgtccctgggtacttgagattagggagtggtgatgactcttaaggagcatgctgccttcaagcatctgtttaacaaagcacatcttgcactgcccttaatccatttaaccctgagtggacacagcacatgtttcagagagcacagggttgggggtaaggtcacagatcaacaggataagaatttttcttagtaccgagcaaaatgaaaagtctcccatgtctacctctttctacacagacacggcaaccatccgatttctcaatcttttccccacctttcccccctttctattccacaaaaccgccattgtcatcatggcccgttctcaatgagctgttgggtacacctcccagacagggtggtggccgggcagaggggctcctcacttcccagtaggggcggctgggcagaggcgcccctcacctcccgggcggggcagctggccaggcgggggctgacccccccacttccctcccggacggggcggctggctgggcggggggctggccccaccacctccctcccagayggggcggctggcctggcgggggctgacccccacctccctcccggacggggtggctgccgggcggagacgctcctcacttcccagacggggtggctgccgggcggaggggctcctcacttctcagacggggtggctgccgggcggaggggctcctcacttctcagacggggcggttgccaggcggagggtctcttcacttytcagacggggcggccgggaagagacgctcctcacctcccggacggggtcgcggccgggtagaggcrctcctcacatcccagacggggcggcggggcagaggcgctccccacatctcagacgatgggcggccgggcagaggcgctcctcacttcctagatgggatggcagccggrcagagacgctcctcactttccagactgggcagccaggcagtggggctcctcacgtcccagacgatgggcggccaggcagagacgctcctcacttcccagacggggtggcagccgggcagaggctgcaatctcggcactttgggaggccaaggcaggcggctgggaggtggaggttgtagcgagccgagatcacgccactgcactccagcctgggcaccattgagcactgagtgaaccagactccgtctgcaatcccggcacctcgggaggccaaggctggcggatcactcgcggttaggagctggagaccagcccggccaacacagcgaaaccccgtctccaccaaaaaaatacgaaaaccagtcaggcgtggcggcgcgtgcctgcaatcgcaggcactcagcaggctgaggcaggagaatcaggcagggaggttgcagtgagccgagaaggcagcagtacagtccagcttcggctcagcatcagagggagaccgtggaaagagagggagagggagaccgtggggagagggagagggagacggagagggagagggagagggtaagttgttttaaagtaacggagatgagttcgaagagactggctttgcctaattgactgaacattgactttctggatgtgtagctacccctttgtttaagaaactgaagtgtttttcacaacttgatgttagacaagattggttggataagttgtcagcagctggccaaactgattttaaccaaggcgtttctaaagtaatttcttctttgaaatctgtcgtagtggscttatcttcacatgaactgtataattctagacacaaaggccaggctggccaacatggtgaaaccccgtctctgctaaaaatacaaaaatcagccgggcatggcagcctgttcctgtaatcccagctactcgggaggctgaggcaggataatcgcttgaacctgggagggggaggttgcaatgagccgagattgcaccactgcactccagccttggtgacagaatgagactctgtgtctcaaaaaaaaaaaaaaaaaaaaaaaaattctagacacaagctaataaattacataccaacagtacaaacctgagctactgctttttgtgttaaaaggttgaaactgataaagccactgttggatttgagagcctggaggagtgttatatggcaaagatacttgttgctgaaggtaccagggatgttcccatcggagcgatcatctgtatcacagttggcaagtgagtagtgcgctcataatttgtggaacttcattgcttggtggagtattttacccagaattgagaattaggagttaaagactattttttaagactacttttgtgaaagctgaatctgcccattatatttatgcattctttctcttccttaggcctgaggatattgaggcctttaaaaattatacactggattcctcagcagcacctaccccacaagcggccccagcaccaacccctgctgccactgcttcgccacctacaccttctgctcaggctcctggtagctcatatccccctcacatgcaggtgaggctcagcctctgagtttttgctctaggtgattacttacttactcactttttttcatagatggctactacatcttggaaactgacattaaatgtggttaggtcttgtcatttgggagtatataggtttaaacatgaagattgacaactattcttcctggttgttatttccagttataagaacttgaacagttcctgtaacctttctcagcctcagtgtagtacacagggtaatgcgtggcacttttcattcaagaacattacattacagattttgaggatgatttttactaacatctattccctgtataattagagtttatagcaggctgtgttagtctgttttactttggcatgaagaaatacctagggctgggtaatttataaagaaaaaaggttcatttggctcaaggttctgcaggctgtacaagaagcagggcgccagcatctgtttctcttgtggccacaggaagcttacaatcatggtggaagttggaagggaaaggggaagggtggtgtgtcccatgagagagggaacaagagacagaggggagtgggtaaccaggctctttatagcaatcagatttccccttaactcattaccatggggcatgcagcaagccattcacgagggatcctcctccaatacccagacacctgccaccagaccccatctctaacattggggatcatatttctttttttttttttccacatacaaaaaaactttatttacacagtcttggattctgaatctccagtacttccagggtctcttgatcaaatggggcagcagcaggcagggaagcaaacacaggggccagtccagattatcttactcaagaacaccaccaagaagggaaggcctaattcagtcttggtctggactacatctccccgcactttgagatcaccacagtagtttgggcttattgttggggcctgtgggaacattctgaatctttctcatcactagaagtccatcagtgatttttccaaacattacatgcttcccatccagccaatcacacttagagcaggtgataaagaactgacagccatttgtactgggaccgctgttygccgtggaaagcaggcctggagctgagtgtctaagtttaaaattttcgtctgcgaatgtctcctggtaaatactggcgactccagtaccatctccattaacaaaatctccaccctaaatcatgaaatcctttatgaccctgtggaaagtgcttcctttgtatcctattggaaccccatcttttctgaattctctagtgcagaactacccaaagttctcggtcgtcttaggcacaacgtctgcagagagctcgatctttgtgcggccaacttcctgactgccattgctgacatcaaagaacaccatggggttagcagggcttgaagttgccaccaccatggctctgacccggaaacggaagtcagggggatcatatttcagcatgagatttggaggggacagacatccaagctgtatcataggtgtcaagtgctgtctgttgaatgaaagtccccagttggtgttcttttgacatgtggtgatctattttccaagagtgggtgaagtagtccaatagtattaataaatgagaaaaytgacaaaagttaagtgtaagatacacatatgtaatagtgttgcatcaaagttgaaggcagtgaatgtaatcactgttgattgtgctaactaaatcagtttctaagaaactaagtcagtttattaggtattagggttatcgtctgtatatttgtgtgctttagatgttaaaagtggataaaaatccagccgtccttttctaaataattctgactggcatttctccttaatctagtttatttgtagaaatttttgtataggaatctttttctcctttggaaataatgttctactccatggtctgttagtaacaatcatttaggattttttgccaggtgttcagttcacacatgtattacatgctgttcggcaaattctatctcatgatgtaagactgacttaattttcctctactttgtgtctgtagctttgtgtgcatgtgttagggttttaccttaattattctttaagatactgaattggattctgaatctctgatagtattctttaagatactgtatagagattattggcttcactgtttcttaagaagcagatgaagatggcaaattctgcacaaaaaaagcacttacaattttttttctaaggcttgtcttactttcccctctctggaaacatcttcaattgaagttattttcctctccgcataatcctgttgctaatcagatacagaagacaaagaggatagcaaatgaaaccaaattcagtggatacacaagccatataaatagtaaagcaattttacatttagataggcattctgatgtttggatattattggggtggaaatggctattataaaaacagggctttttttacccctggttttttatttttatttatttattttttgaaacagggtctcactccatcacctaggctggagtgcagtggcatgatttcggctcactgcaacctctgcctcctgggttcaagcgattctcctgcctcagcctcccgactagctgggaatacatgcacataccaccacacctagctattttattttttgagatagggtctcactcttcacctaggctggagtgcagtggtgcaatcttagctcactgtagccttgacctcctggctcaagccatcctcccacctcagcctcccaagacgctgtgactacaggcacgtgccaccatgcccagctaatttttttttttttttttttttaagagatgaggttacatcatgttgctcaggctggtcgtgaactcctgggctcaagtgatcctcctgcatcagcctaccaaaatgctgagattataggcatgagccaccatgctggtctttcctgtttttttttttttttttttttttttttgagacagtcttgctctgtcaccatggctggagtgtagtggcacgatcttggctcacggcaacctytgcgattctcatgcctcagcctcctgagtagctgggactacaggtgggtgtcaccatgcccagctaattttggtatttttagcagaggagggggtttcgccatgatggccmggctggtcttgaactcctggcctcaagtgatccgcccctcccaagtgatccttggcctcccaaagtgctgggattacagatgtgaacagctgtgcctggcctcctgttttatttttttgaatgatcatcatgccactgcactccaggctgggcaacagagtaagactccatctcaaaaaaaaaaaaattatcaaataaaattctgtgtaagaattctgtgtacatatattatatacaacaagttgttttgaaatatgtatatattgtggaatggctagattgagctaatttatatatgcattactttatagacttatcttttaggccacttaaaaatctactgtcaggaatttacmagaatacaatacattgttattaactattgtcaccaaataatgtttttttttttaatatggaatgcttcacgaatttgttgtccttgcgcaggggccatgctaatctctatatcgttccaattttagtatatgtgttgctgaagcgagcacagaacagttcttaatattacgtttttatcttggaaagatatctggtaaggttgggacaaatgcagtttcctgtgggtaaaaaataggtagatgctaagtacagagcgcagtaaaattttaacagaatggtttggaccaaggtcattttgtgaaaatgaaaaacttctkggttaaaaaaaaatgaagtctgggcgcggtggctcacgcctgtaatcccagcactttgggaggccagggcgggcggattacttgtggatgggcgttcagagaccagcctggccaacatggtaaaaccccatctctacaaaaatacaaaaattagtgggcatgatggcacccgcctgtaatccagctactcgggaggctgaggcaggagaatcacttgaaaccaggaggtggaggttgcagtgagccgagattgcgccattgctctccagcctgggggacagagcaagactctgtctcaaaataaaaataaaaataaaaatagatgaaaagatgctccatacttagatgttgagaaattaattttgactgtctgaaagaaatctttcccatgtgcttgttgcatttaacttggagtgtgtgttagagtgtgggcgagagtataagagtatgggtcagagtatgagatttgaaggatgatttacctggtgggaagctattgaggtgygaagcttttgctgtggtgagtatttggattatcatagtcaccatcattctatgaaaccacataagtctgccagactyttattatgtagaagtcttcctggtattaagcaataatatgtgtttgtttctgcaggtacttcttcctgccctctctcccaccatgacyatgggcacagttcagagatgggaaaaaaaagtgggtgagaagctaagtgaaggagacttactggcagagatagaaactgacaaagccactataggtgagatttcttcagctcttaatggttgaggcactgagtttcccaatgaggaagaggattgccattctttcctataatgagtgagtgataatatgaaaactttataattcttaggattcattttctgggacagaatattttatttttatttagttatatgtattctttagtttttatttatttatttgtttatttgcttatttttcagacagggtcttaatctgttgcccaggctggagtgcggtggcaagatcatagctcattgtagcctygaactcctgggcttatgcccaaatgatcctcctgctttagcctcacaagtaggtaggactacaggcctgaaccaccacacctagctgattttttaaattttttgtagagatggggtctcactttattgcccaggctggttttgaactcctggctcaagcgatcctcctgccttggcctctcaaagtgctgggactccaagcgtgagcccctgttcctggcccagcataatttataacaaaaataatgcgtagtcagatttgtcagttccatcctgtgctcactgaatcaaaggcaatcaatctgtcaattcacagattatttttaggcccmagtttgcttcttggccttattatgttactgagaagctatatcagaattgctgctgtctaaactaggcaaaggaagtcaagaagaaacaggagaaaatcacttccatggcaggataatagcaaagaatttaagatgactttgagggaaaactgaaaccagggttgagattgttttcatagtttgagaatgactgatagaatgtatgtgtgtaatatatatatgttcagatatgtcatatgtccacatatctccttcttaattcatttttaggctaaaaaaacccatatagacaataatatatttattattattattttttttttttttgagacggagtctcgctgtgttgcccaggctggagtgcagtggcgcagtctcagctcactgcaagctccacctcctgggttcacgccattctcctgcctcagcctcccgagtagctgggactacaggtgcccgctgccacgcctggctaattttttgtatttttagtagagatggggtttcactgtgttagccaggatggccttgatctcctgacctcgtgatccacctgtcttggcctcccaaagcgctgggattacaggcgtgagccatggcgatttgtagtrttatgaatttcttctctctgcacccccgctttttcttttttttttttgagacagagttttgctctgtcacccaggcttgagtacagtggtgcgatcttggcttactgcagcctccgcctcctgggttcaagcaattctcctgcctcagcctcccgagtagctgggactacaggcatgcaccaccatgcctggctaattttttgcatttttagtagagatggagtttcaccatgttggccaggctggtctcgagctctttaacctcaggtgatctgcctgcctcggcctcccaaagtgctgggattacaggcataagccaccgcacccagcctctctgcttcataatcaccaccaaagggaagcctttcccaaagatgtaatgggaggtactgggcatcctctgccttggttgttttcagattgtgttcttcaaatcccatcattcctttaaggcaccttgaggcaaagggggaattaaagagcaggaccttacagccctgcctccctgccttacttccagcagagcagttcttttctatctttttgtattttgtgcttccccataaattttatttgaagaaaggattctgtttcttaaaaacacagaaactttggaaacagtagttctgcttcaccatttaacttgaataccagtgtcactatagagactagtcactagagaagtgttaccttggttgaactttgaagtctattgtggcccaggagccttttcattttaaacacttctttttttttttttttgagacagagtctggctctgttgtccaggctggagtgcggtggcgtgatctcggcccaccacaacctctgcctcctgggttcaagcgattctcctgcctgagcctcctgagtagctgggactacaggtgcatgccactacgcccggctaatttttgtatttttagtagaaatgtggtttcactatgttggccaggctggtcttgaactcctgacctcgtgatctgactgccttggcctcccaaagtgctgggattacaggcgtgagccaccaccgcacccagccttttttttttttttttttgagatagagtcttgctttgtygcccaggctggagtgcaatggcatgatcttggctcactgcaatttccacctcccgggttcaagcaattctcctgcctcagctgcccaagtagctgggattacaggcgcctgccaccatgcctggctaattttttgtatttttagtggagatggggtttcaccatgttggccaggctggtcttgaactcctgacctcaggtaatccacctaccttggcctcccaaagtgctgggataacaggcgtgagccaccgtgcccagccttaaacatatatatatatatatctccagacttaaacatatatatatgtgtgtgtatatatgtgtgtgtgtgtgtgtgtgtgtgtgtgtgtgttttttttttttttttttttgagacggagtttcgctcttgttgcccaggctggagtgcaatggcacgatctcggctcaccacaacctccacctcctgggttcaagtgattttcttgcctcagcctcccgagtagctgggattacaggcatgcgccaccatgcctggctaattttgtatttttagtagagacggggtttctccacgttggtcaggctggtctcgaactcccgacctcaggtgatccacccgcctcggtctcccaaagtgctgggattacaggcatgagccgccgcgcccagcctaaacatattttttattgggtattctcagctgggaaatggaaggattcatcaaagatgtgttcatcaaggagaggcacaacagtacagaaagccaatggcttcttttagttttacttttgcaatcctaaatgtttaagttctttgcaaggaaggcagtagttgaataaaatataagttgtcaacaccatagaaatcccagtaaagctgtaattctttacattgaaatacttggtataatatcaagtataacctctttgaaaagttccaaagatgcttttagggctgaaatccaacattagtatctaggttggtagctcccttaattaggcatgtatgtggttcttatctttagcagcatagctgacaccatcttagagtcctgtgagtctgcatggggactgtccttggagattttttaataactttgagaactaaccactgtctgtaatctttcatagttttattgaacagatttttatttggcatttactttgtaccaggttgtattatttctaagaacttgaaaaatattaatctgtttaaatgtataacatcccagtaccartccagtgagattggtactattattatccccgtattgtaggtaaagaaaccaagacacagaaggttaaataggttgcaaaaaaggctatatagctagcttgaatgagaaaaatcactttacttaaaactgtgctgtgagtttggagggatagtggaatctcttaagtcccataatgttttttctttctatttaaggttttgaagtacaggaagaaggttatctggcaaaaatcctggtccctgaaggcacaagagatgtccctctaggaaccccactctgtatcattgtagaaaaagaggcagatatatcagcatttgctgactataggccaaccgaagtaacagatttaaaaccacaagygccaccacctaccccacccccggtaggtatgcttctanaattcaggaaacacttaccttgttcatctctaaattaaggagttttgattagatgatatcctaggttccttccacctccaagattctatgactgaggagggagatagtttattaacatttgtggagacctatagtgtttgttgtactgcactgttcacctaatggttgatagtttgggccttgtagcttttttcttcctgctatctagagtcctgctgagaacaaagctgagtgacatgttctctttctgctttagatacagataccatgcttgtggaaagtaaggcttcattgccccacccttttttttttttttttaagagacaaggtctcaccctgttgctgaggctggagtgcagtggtgcaatcatagctcacttcattgcccatttattattaaatatactgaataatctctgtcacttgaaatcctcttgttattgacttagtaggtcaagcatatatttgtgatacagtggaaccttgacatgacttgttttgcctagaatttattatatcaccaaatacttgatacactatataactataacctgaacttgtataactccaaccagagataacactgacagtgaagcttcagtgattctcacagatgctagaatcatgtgagtttaaactaggtaaacatttctataagagaaaagttgatttctgactactgtacatttgtgggaagctggcaagtagcattgttgttggatttcttttgttgttgttgttgagacggagtcttgctccgtcacccaggctggcgtgcagtggcgtgatcttggctcactgcagcctatgcctcccgggttcaagcaattctcctgcctcgacctcccgagtagctgggattacaggtgttagccaccatgcccggctaatttttttatttttagtagagaaggggtttcaccgtgttggccaggctggtcacgaactcctgacctcaggtgatccacccacctcggcctcccaaagtgctgggattacaggtgtgagccaccacacctggccgtatttcttaagatacttttcaacatggggccttacagcataattttatattttgaaattagctggctgggtgtggtggctcatgccagtaatcccagcactttgggaggctgaggcaggtggatcgcttgaggtcaggagttcaagaccagcctggccaacatggtraaaccccatctctactgaaaatacaaaaaattagctgggcgtggtggtgcgtgcctttaatcccagctacttgggaggctgaggcaggagaattgcttgaacccaggaggcggaggttgcagtgagccaagtttgcgccactgcactccagcctgggtgacagagcaagactctgtctcaaataaaaagaaaaaaaaaaaagaagttaggataattaaaaataaaaatcatgttggtgatgtaaaagaatgcgaataaagaagtggtaagagattaaagtgaagaaaggctgtagaatactatacactgattggcaatattcaattctgtgcttcatgttgttatggaataaggtaactgttctgtctttgatatagaagtatattgttctcgctgttcgtattactacattatgttggttaagctggcgaaaagtacattatgatctttggaaaaatgaaagttattaatatttaattaaaatagttttaatttattaataagatgtaaacttttaatytttcagaccagtctttgaagtggtgaattaaaacaatttgtaattttttttcaaaaggtggccgctgttcctccaactccccagcctttagctcctacaccttcagcaccctgcccagctactcctgctggaccaaagggaagggtgtttgttagccctcttgcaaagaagttggcagtagagaaagggattgatcttacacaagtaaaaggtaaatctgtttctatagaatggactttataaagttaaaatttagttgaatttcctccttaagacttgcaagtacaactatgtatagccgtacttataattgggatagtagggacaatcattaataattccttcagaagggagaaatagttcttttgttgccaccacagagtagggaaacttttactgagctttatttactctgcctagaatctacccatacactttagatacctttttttttcctcttctattcatggaaactgcttgtttggtgaaagtatatgtaaaatttggttatgggacttgattatgtaataagaaacctctgttagtgcttggttgactgtagcaataagcaaagcaaaataaaatttgaagttggggtgatttggaatgacttaataaaattcatataaaacagaactagagctccctgaaggcaagggaaaacgccttacttgtctgtctgccgccaaagaaaaaatatagctttgtgataagagcatggggcctggaatcagaccacctagcatttaatcctggctttataattttctatgtaatatgttttccagtgaattacttagattgtatgtccttatgtcaattacttttctatctgtaaaactgaggtactgtacatcgtatagattgtgagagttaaatgagctataacaggtgaagtgcttagaactgtatctagcatataagtactcaatacatgttagttgtcattcatattgatattactgcctggtgcttaaataagtttttttgaattaaacttaagctaaaatttagtgtaggataactaaggtacttatttggaatggggggaagttattatgcttggaacttggtttgatggcttgtactatgtgtcagtcatttaacttaccatacttaatgtacacaacacttcttgaagtaagaattatcattccttattttctggataagaaaacagactctcagactcttcagggttcttccttcctgttaaatagtaaagttgcagtgtaactctagatttgtttaactctaaagcctgtttcttcacactaccctatcctgccttctgttttgatgctctgccatccataattactaaagaaaaatatgcttatttccccaattttctagttatgggtactcaatggtggttatcccgtatctgcaatttgctatcttgtagttagaagtcaagccmatcccmagacacmagagtagaatgttgtaaattttttggacctcagagattcttgtaatattggaagattcttttttttccatcttaatgccatttcagtagtatattgctatcatatatgtatatatgattagaatcagggacagcagtgtaagttggagtaacttttaaagggagaaaggactgggttaataattatatctaaagaatttagasaagcaaagaaggaccatttattagatattcagcaatactcgttaccttactaaagatataagtggaaaatcccttaggtatgagctgagaggagtgttaaaaaaaaaaaagaaagaaagaaaatcccactgttcttactatgcaggcagagttaggtgataaatatcatcgactgctatctacacatcagacacttgttcatcagatggataagatttcagtttcagttgcttatatgaccaacaataaagaattaaatgaacagaaagggagtatagcatagtagttaagagtgtgagctctgtagctggaatgcttgggtatgaacctcagctctttatactagctgtgtgaccttttgtgtcacaatttctttgtatataaaaacattaggtttaatggttgtgaggtttaaataagttaaccagtgcctgtacagagaaagcatatctaggtattagctataatgataataatatttttgttattaaataagatgatttgagtgctaagaaagaaagaaactcagtgatatactagtgagtgaaagggtgaatggatatatgtgcagtcatgactacttttagacaggttggttgggagatctttttgatgaggtgacatttgatttgttttgaaagataagaaggaggcagcttgagccaaccatgtgaagaactggggaaagatcattttggatagagagactagctgtacacagtctgaaatgggaaagagtttagcatgtctgaggaacataaaagaggccagtgttggccaggcgcaatggctcacgcctgtaatcccagcactttgggaggccgaggcaggtggatcacaggtcaggagatggagaccatcctggctaacacggtgaaacctcgtctctactaaaaatacaaaaaaattagctgggcatggtggcaggcgcctgtggtcccagctactcgggaggctgaggcaggagaatggcgtgaacctgggaggccaaacttgcagtgagccgagatagtgccactgcactccagcctgggcgacagagcaagactccgtctcaaagaaaaaaaaaaaaggccagtgttaatgaagcataatgagcaaagggtctagtaggagatgagattggaaaaaaacagggatgagaacataaatgaccttatagattatggtaaagagtttgaattttatttaaagtacttgaggaagccattgagaaatttaagcaaagaagtgaaataaaatgattatgttttgaaaagatcattttggttgctccatggaaatggatgaaacgtttatatagtttatgtttgacaagatccctactttttgttacccatagtccagtgttgttccctttataccatattgctttatgatggcctgttgtgccgcccaagagagatagggaaaagggtttacaaggtttcaactaactcctaagtcaggaaattcttgtgggtggctgaagcttagcataaggcaggtggtactatggatttcctcctcttgagggactgtggtgtctagatyagccttggttgtaaggggaggttatggtttctgtcttttacaaaggagagaaatctaataggggtactaccacctctgttctagagctcctagtgaggataaatacaatcctagccaactcagttttcgtaatgaaggaaaggaattgggaagaactacacacaacaagagtcctttttaaagtctgccttgggggaagatgaatcagtttgaccaaatttttcctagaagtgggccagtgtaaaaggtattctataataataactaaattctgaatctccrtagaattaaaggtcaagattatctacttgggtccaaaattaaacctaagaggctgtaggtgggaggagggaggaaattgaatataagtaaaattaaacctactgagagaactttgaagatccttcctcatgtgtgacattgcacctttttccttcatttcctttaacacgggccagtttagagccttggctactgtgaaaaagctatgagtcatagagaccacataaggaatgaatgattctaaagataagataattgcagtaaagagttattcgtgctattttggggtgaaaaaatcgacttgatttgtcaaaacaattattgttatacctgtaaattctgtataaaaggaattctttatggtcacataaatccagaacccaaatgaaatctatttcacggcttaggaatggttttttggagctaaccaggaggaggcagctagtttcccttttggagatataaactgtgctcggcattatccttatgccacatttcccaatttaaaagtaaggaagatgaaaaaaattaagtacaacttggataaaactctaaaagagaaatacataaaggaatatttgcagtagttaaaaagaaaagacccactccagatcacacactggtactctgtgtggattaaaattaatagttgacaaaagctggtatttgtaggtagcaccttaaggggtagggttaaggctgtgaacctttcagaatgtttttggtagtaaacccttaggagcttgcagtttaggatcacagygttgatctccttggggaaccaatggtatgtcatcatgtatgtgatatttatgtctcttacagggacaggaccagatggtagaatcaccaagaaggatatcgactcttttgtgcctagtaaagttgctcctgtgagttatgtgtagctcttactttttttgcagtttgtctctacagcctgttagaccatttcatacattatttatgaacgaaatagctcaaccaagattgttttcttctaatttcagtggtttaataatacagtcatccctcggtacccatgagaggttggttccaggagcccccttgtataccaaaattcrcaaatgcttaagtctcttatataaaatagtgtagtatttgtatataacttacccacatcctctcaaatactttaaatcatctctagattacttataatattaaatacaaggtaaatrctatgtaaatagttgttatattttattgcttaggaaataataataaggacaaaaagtctgtacttgtgcagttcagatgcaaccatctgtttttttctggaatatttttgatttgcctttggttgaatccagtgatgcagaacttatggatatggagggccaagtgtatttagatatttgtgtgctatcatttatatacaagatcaaagatgatatactacattgacatgtattccacattatgttttgagctagttaatcggtttttgctttgaaataaaagatttgttctttttttctttttcaaaatattttaaagtacagttgaatgagttgtttttggtgtttggttttttttgtttgtttgtttttgagacagtctcactctgtcgcccaggctggagtgcagtggcgcgatcttggctcattgcaacctctgcctcctggattcaggcgattctcatgccccagcctcccaggtggctgggactacaggtgcatgccatcacacctggctaattttcgtatgtttagtagagacagggtttcgccatgttggccagcctggtcacgaactcctggcctcaagtgagtcattgtgaggctcaagtgagcctcccaacccccttttcttaacattgtttaggataatggattagcttgtttatacttatttattattccttgcaacttaagaatgcttccattgcttttcttgaacataattttgcaaaaacaaaattattttgacacaaactggtcattgaacatactctgatacaaagaaaaatgacacttaaaacatgacttcagaattctaagtaaaaaaattaaaactcttaaaacaagcagaagtctcttttgctcactggggacagaaataggtattctataaagcttagtttttagactggacatggtggctcatgcttgtaaccccagcactttgggaagccaaggtgggtggatcacttgagcccaggcatttgagaccagccagggcaacgtggctaatttccgtctctactagaaatccaaaaaaattagctgggcatgttggcgtgcacctgtagtcccagctactctaggggctgagatgggaggattgcttgagcccaggaggttgaggctgcagtgaaccatgattgagccactgcattctagcctgggtgacagagcaagactctgtctcaaaagacaaaaaaaaaaaaactgcatagtcactggcagtctttcccaggtacttacgctaagattgaatcacagttactaagagctttttctttcctcccataggctccggcagctgttgtgcctcccacaggtcctggaatggcaccagttcctacaggtgtcttcacagatatcccaatcagcaacattcgtcgggtaagagaattaccatcatctggaatcagctgttaggggcatctttagttgtttagttgcttccatagtttttaacacattaacagaggctttttaagttgggaatattggatgattactttaagggaagttttggccaactgaatacttgaatcactttgttcctattagaagggccaggcgcagtagctcatgcctgtaatcccagcactttgggaggccaaagcgggcagatcacaaggtccagacttcgagaccagcctggccaacatagtgaaacaccccgtctctactaaagatacaaaaattagccgggcatggtggcacatgcctgtagtcccaagtactcgggacgctgaggcaggagaattgcttgaacttgggaartggaggttgtggtgagccgagatcgcaccaccgcactccagcctgggcaacatagcgagactccatctcaaaaaaaaaaaaaaatctaggaggtgttatattatggcggagtcctccatctttcaattataataatgcttgaggtaagtattagcagagagtaaggtgaagagacaaacagagccctaaattagttaaggtcttaactcaagataattgattttttaaatctctttggtttcaggttattgcacagcgattaatgcaatcaaagcaaaccatacctcattattacctttctatcratgtaaatatgggagaagttttgttggtacggaaagaacttaataaggtaaaagttctgaaaattccaactttctaagttataaaaattttgtctttccccaccaaacatttatatttttgtccatatattttgttacaatatatcagttggtggttactttcttgatcttgtcctttgaagcacaagattttaaatattggttatgtccacttttatcaatttttttcttctgtgcttttggtattatatctaagaaactattacctagtctaaggtcatgaagatttatacttttgtttccttgtaacagttttatacttttagttcttatattcaggtctttgctctattttgagttaattttttataggtggtgtgagataggaatccaaccattgttttgcatgtggacatttattctttcatcccagcaccatctttccccatcgaattgtcttggtatccttgtcaaaattaatcatatatgtgagaattttatttccagatttttttttttttgtagatcttgttattttttgttttgttttgttttattatactttaagttctgggatacatgtgcagaacgtgcaggtttgttacataggtatacacgtgccatggtggtttgctgcacccaccaacccatcatctacattaggtatttctcctaatgctatccctccccttagccccccacccccctacaggtcctggtgtgtgatgtttccctccctgtgtccatgygttctcattgttcaactcccacttacaagtgagaacatgcggtgtttggttttctgttcctgtgttagtttgctgagaatgatggtttccagcttcatccatgtccctgcaaaggacacaaactcatccttttttttatggctgcwtagtattccatggtgtgtatgtgccacattttctttatccagtctatcattgatgggcatttggcttggttccaagtctttgctattgggaacagtgctgcagtaaacatatgtgtgcatgtgtctttatagtagaatggtttataatcctttgggtctatacccagtaatgggatttctgggtcaaatggtatttctggttctagatccttgaggaaccgccacactgtcttccacaatgggttgaactaatttacactcctaccaacagtgtaaaagcgttcctatttctccacattccagcatctgttgtttcctgactttttagtgatcgccattgtaactggcgtgagatggtaactcactgtggttttgatttgcatttctttaatgaccagtgatgatgagctttttttcatgtttgttggccacataaatgtcttcttttgagaagtgtctgttcatatcctttgcccactttttgatggggtcatttgtttttttcttgtaaatttgtttaagttccttatagattctggatattagccctttgttagatggatagatttcaaaaattttctcccattctgtaggttgcctgttcactctgatgatagtttcttttgctgtgcagaagctctttagtttaattcgaccccatttgtctattttggcttttgttgccattgcttttgttgttttagtcatgaagtctttgcccatgcctgtgtcctgaatggtattgcctaggttttcttctagggtttttatggttttaggtcttacgtttaagtctttaatccatcttcagttattttttgtataaggtgtaaggaaggagtccagtttcagttttctacatatggctagccagttttcccaacatcattgattaaatagggaatcctttccccattgcttgttgttgtcaggtttgtcaaaaatcagatggttgtaaatgtgtggcattatgtctgaggcttctgttctgttccattggtctatatatctgttttggtaccagtaccatgctgttttggttactgtagccttatagtatagtttgaagtcaggtagcatgatgcctccagctttgttstttttgcttaggattgtcttggctatacgggcccttttttggttccatatgaaatktaaagtagtttttttctaattctgtgaagaaagtcaatggttgcttgatgaagatagcattgaatttataaattactttgggcagtatgtccattttcacgatattgattcttcctatgcatgagcatggaatgcttttccatttgtttttgtgtcctctcttatttccttgagcagtggtttgtagttctccttgaagaggtccttcacatcccttgtaagttgtattcctaggtattctattctttttatagcaattgtgaataggaattcactcacaatttggctctctgtttgtctgttattggcgtgtaggaatgcttgtgatttttgcacattgattttgtatcctgagacttcactgaagttgcttatcagcttaaggagattttggactgagatgatggggttttctaactatacaatcatgtcatctacaaacagacaatttgacttcctctttttctatttgaatactctttatttctttctcttgcctgattgccctggccagaacttccaatactatgctgaataggagtggtgagagagagcatccttgtcatgtgccaatttttgagactgagtctcactctgttgcccagactggggtgcagtggcgtgatcttggcttactgcaacctccaccttccaggttcaagcarttctcgtccctcagcctcccgagtagctgggattacaggtatgagccaccaggcatggctaatttttgtatttttagtagggacaggatttcaccatgttggccaggctggtctcgaactcttgacctcaaatgatccacccaccttggcctcccaaagtgctggaattacagccatgagcccccatgcctggcctatttccaggttcttaattccattccattaatctctgtatacccttaatgtcagtaccacagtcttgattactttagctttgtaataagttgtaaaatcaggaaacgtgagtcatctttgttcttttttctcaagatttttttttttttttttttttttttttaaagacagagtcttgctctgtcacccaggctagagtgcagtggcgtgatcttggctcactgccagctctgcctcccgggttcatgccattctcctgcctcagcctcccaagtagctgggactacagacgcccaccaccatgcccggctaattttttgtatttttagtagagacggggtttcaccgtgttagccagaatcaagattgttttgtctgagtcccttgcaattctaagtgaattttaggattagcttgtaaatttctgcattgaagccagttgacattttgataaggattgattggatgtatctgctgatcagtttggcaagtgttgccatccgaagaatatagtcttttcatccatgaacatgtagatgcccctgtattagttaggtgttcttcagtctctttcaacagtttttttatagtttttcagagtgtaagttttgcactctaaatttgcatttgttaaacttatttctaggtattttattctttttgatactactctaagtggaattgttttctagatttcattttcagattgttcattgctactatataaaggtatgattgatttttttttttttttaagactagtcaggtatactagtgagaagggcggaagagtaraaaagaagttagatttataatggactctgagcaatcaattgagataacaattcatttttctatattgatcttttttttcatatacctgctgaaatgggatctatattgaccttgtatcctgcaaacttgctgaagtcatttattagttcttacagttttttagtgtatttcttaggtttttctgtaaacaagataatgttatctgcaaatagagataattttacttttttcattttgacctgtatgccttttatttcctttcttgcctaattgctctggctggcgcctctaggcaatgttgaataggtgtagcagaagtgaacatcttgtcttgttctygatctttgggagaataagtctttggtcattaaatagttgtgaggtttccrtagatcaggttgagcaagttccctcctgttcccagttagtaagagtgttttgatcatgaaaaggggtattgaattttatcaaatgctctttctgtgtctgttgagatgattatgtgttttttgtcctgtattctgttaggacattattacattaatggattttcagatgttaatggaaatttgcattcttgggataaatcagatttgatcatggtgaatgatcctttttatatattgctggattttatttgctagcgttttgttgaagatttttacatctatattcataagatattagtgtgtacttttttttttttttcttctaatgtcgtctttggttttggtatcaggctaatcccggccttayagaatgtgtggggaagtgtttcttgctcttctttgatttttctttgaaagaatttgtgaggaattgatattaattcttctttaatatttggtagaatactgacgaagccatttgggtctaagcttttctacatgggtagtttttaaattaccagttcaatctctttgttagttataggtctattcagagtttttgtttctccttggttcagttttggtagcttgtgtctgtatggttgttcatagtattccctataattctttttacttctgtaaggtagatagtaatgtcccctatttcactcctaattttagaaattctagtcttctctcctcttcttggtcagtctaactaaacatttatcattgtggttgtcatttgattgatcttttcaaagaaccaaattttgttattgttgagatgaatgaaaatgatgacataacatactgtaacttatgggattatgctaaagcagtgcttagcaggaaacagctgtaagagtccgcatttaaaaagatgaaagaaccaatgtttggtttcatttctttctttccacctcaggatatttgtatattctctttctcttcctccttttctcacgattatacagttttactctttggtgagagaatttagaaactacagttgtccggggagggaaagcattaggaaaaatagctgatgcatgtgaggcctaatacctgggtgatgggttgacaggtgcagcaaaccaccatggcacatgtttacctatataataaacctggacattctgcacatgcaccctgaaacttaaaattaaaattaaaattaaaaaagaagaaactacagttcttcttgtctttccagatattagaagggagaagcaaaatttctgtcaatgacttcatcataaaagcttcagctttggcatgtttaaaagttcccgaagcaaattcttcttggatggacacagttataagacagtaagtataactggggaagatatatatccatcggtagttttcttgtattatttaatgtgtgagtggagttgaggggataaggagaaatggaatacagagaggcagatgacttacataggtcaaacaacttgaaaacaacacaaaaatgtttatgagttactgctttttacttttttttcttactggccccaattttcaaccttgtttttgtttttgtttttgttgttgttgttgatttattttttaaagagatagggtcttgctctgttgtccaggctggtcttgaactcttgggctcaagcaattctacagcctcggcctcccaaagttctgggatttcaggtgtgagccacagtgtccagcctgcgatattgctggatttagctagtaaaggctatagattctttgtatgagttcagcaaagggagattagtgaacaaatatgtgtaattaagttgataatgactgtcacaaagcagggttaaacagatgattttcattctcctgaactttacgggcaaaattagaacagtaattgttaataatacaatggtatagagtagtatggtactcagtgtgtctcttttatctcattcaattctcatgactatcttatgatttaagtgctttcacttccatttctagataaagaaacagactccgtgagttaagtaacttgccctgagttaataaattagtgttaggastgtgattagaaccaagattctgactcctaagcctattcgtttcttgctgtgtagatgcttctatgttattcttattctgaaaggaaaaaaacaaacttttttcctttgtactttgctgtcacacagtcacagcaccgcttctgtgaccagatgagtagaggcaggggtggggagggtttccccacacaccaaccaaacaattaattctgcagtgatttcctctaattcaattcaattcaattctggtgctgtctacctgtagatagtgtcagatcccaaagattgagggctcagtcctacaagactgccctcacttcagatgccagtcaaaagtgtaggccactcatacttgtaactgactggctacaaacttgttgctgtgacctcttccttgggtttgattaacttgctaggacaattcacagaacttggggaaacactttatgtttattataaaggatattacaaaggatatggatgaacaccagatgaagagatggctagggcgaggtttgaggtggggtggtgcagagcttccatgtcctttctgggcataccacccttccagcacttccacagttcagcaactggaagctcattaaatcttgttgaagggtcttaatagagggggctggggagaaaaaggaaaggaagaaaaaagtctttgtagagtttgatctccaggatctccagcctacatctccctcccctttcccttaggtcagtgggtagagctaaaagttccaactctctaatcctctagtcattttgacccttccagtgactggcgccatcccgaggttacttagggatcccaccctaagtatccgtcatggagcttattatataaggrctcattataaataacaaaacatactcctatcactcaggaaattccggttctaggggctctatgacaggaactggcaacatggggacaaagaccaagtatatattataccacacttactaatatttattaatattttagggccgggctcacacctgtaatctcagcactttgagaggccgaggcaggtggatcacttgaggtcaggagttcgagaccagcctggccaacatggtgaaaccccatctctactaaaaatacaaaaattagctgagcgtggtggtgcatgcctgtaatctcagctacttgggaagctgaggcaggagaattgcttgaacccaggaggtggaggttgcagtgaactgagattgtgccattgcagtccagcctgggtgataagagcaaaactctgtctcaaaaaaatattttcctaataaatattaaatttaggttagaatactgctccatggcttagagtgacttgttctaacccttaatctgaggtcagttcccaggaggcaaacacaactgtttgtttttttttgttttttgtgttttgtttttgtgacagagtctctttctgtcgcctaggctagagtgcagtggcgtgatcttggctcactgcaacctccgcctcccgagttcaagcaattttcctacctcagcctcctgagtagctgggattacaggcatgcgccaccactcccaggtaatttttttgtagttttagtagatatggggtttcaccatattggccagactggtcttgaactcttgaccttgtgagccgcccaccttggcctcccaaagtgctgggatcacaggtgtgagctaccacgcccagcccttaaacacagcttttaaactattgtttcttctggtatttatttacctgcagatttccaaataacatttttctgttgccttttatgagtttttcatttattttactttattgactgactccccgttaaagaacattaatatttagctttagctccagtcttgggactagagagaaaaaaaaaggtaggtttgttatgcccttcctacatacacacacataacaccatcttcccaaattgattgtagcacaaatttggattaaatctatatttggggccaggtatggtggctcacacctgtaatcccagcactttgggaggccaaggcaggtggatcgcctgaggtcaagcgttcgagatcagcctggccaacatggtgaaaccctgtctctgctaaaaatacaaaaaaaaaaaaatagctaggtatggtggtgcgcgcctgtagtcccagctaatcaggaggctgaggcaggagaattgcttgaacctgggaggcggaggttgcagtgagctgggattgcacgcgccactgcactccagcctgagcaacagagcaagactgcatttcaaataataataataataaataaatataaatctatatttggttaatttttttagagtatgtgtgtgtgtccagtgttaatatttgaatgcctgtgacagtgattgtgtatgactaagacatgtatgataccatgaatgctaacctaattgattttaataattgctttagggaaggctagttttctacgtatatgtgaattctttctgaaactccacaagcgaggagaggagattcagaaaccattaaaccatttctcaatctgatcaaacctattgggtaaactctttgttctaacttttccttggtcattcttcatttggagaacatctggacatctaatattctttataaactgtatagttttccagggctgccattattaatgaccacaaagttgatggattaaaacaaatttattctctcacagttcgggaaacaagtctgaaatcagggtttcagcaggggcaatgcgttccctccaaagactatagagaagaatccttccttgccttttccagttctggtggctttaggcatttagtggtttgtgattgcataactccagtctcttcttccatctttacatggccttctcctctgtgtctgtattttctcttctcttaagaggacagttggtattggatttagggccactcagataatataggatgatcttatctcaggatcctaattataccttcagagacctttttccaaataaggtcacattgataggttccagggattaggacaaagacttatcttttggagggccaccattcatcccactaaacagactttagtcttcctgttttcagcattattcatactactgactcgtggagagttttctggagcctggcagaaatggcttgcttaaggcattgacagtcttccgtaattcagtcaaggcctatttttttttttttttttttttttttgagatggagtcctgctctgtcgcccaggctggagtgcagtggcgcaatctcggctcactgcaacctccgcctcgtgggttcatgccgttctcctgcctcagcctcccgagtagctgggactacaggtgtgcaccaccacgcccggctaatttttttgtatttttagtagagatggggtttcaccatgttagccaggatggtctcgatctcctgacattgtgatctgcctgccttggcctcccaaagtgctgggattacaggcgtgagccaccgcgcccggccaaggcctatattcaactattgctcctctctaaacccctcttcttgtgccattctgagttagccactgttactgaacatacctttcagttctctccttctaggatgctgtttgggctttcctgttccttgcttttagatgcattccttttccgtgctatggccaccgtgatgatcgtcacagcagcaaacattcaaggaatttatattccttaaatataaatacaggatacttaaaatctagataagaggcaggaattttttttttaatattcctttaattctcctctgtgccagcatatagacactttttttttttttttttttttttttttttttttttttttttttttgaggtggagtctcgctcttttgccaggctggagtgcaatggtgctatctccgctcattgcaacctccgcctcccgggttcaagcgattctcctgcctcagcctcccgagtagctgggactacaggcacatgccaccacacccagctaatttttgtatttttagtagagatgggatttcaccatgttggccagaatggtctcaatctcttgactttgtgatctgcctgcctcggcctcccaaagtgctgggattacagcatgagccaccgtgcctggccgcatgtagacactttttaacatttaatttgccattttacgtatcataaaatgtacctgctctaagtgtacaatttcttgatttttgttaaaggtgcagaattacgcagtctttaccacaatctaattttagaaattttcatcacccccaaaagatcactcatgctcatttatagtaaattcttattttcaccttcagcccctgggcaatttgttatagtgcttgagtctatagatttgtattttctagaccttttatagaaatggagtcataaaatatgtggtcttttgcatctactttctttcacttaacgaaatgtttttgagactcatccatgttgtagcatgtatctgtagtttattcttttttattgctgtatagtgtttaatcgtatcaatatacctctttatcattcaccagttaacatgttttccagttttttgctattatgaatgatgctactatgagtatttacatacagttatttgtgtggacatatatttttatttctcttcagtagattcctaggagtggaatacctgagtcatagggtaaaattatgtttaatttttagagaaacttctacattatttttcaaagtggttgcaccattttaccttcccaccaatagtggataagtgttccagtttctctatgtcctcatcaatatttgttaccgtgtgggtgtgaagtgagaaccatctacttgtgagagtatctcgctttattgcactttgatttattgtgcttttttataaattgaaggcttgtggcaaccctctgtcaagcaagttgatggcaccatttttccaacagcatgtgctcacttcctgtctctgtgtcacattttggcaattcctagagtatttcaaactttattattrtatctgttatggtgacctgtgatcaaggatctttgatgttaccattgtaattgtttcaatgccccatgaaccatgcccatataagatggcaaacttcattgataaattttgcatgtgttctgactggttgatagaattgatagaattatcaaccagctgttcctctgtctctctccctctccttgggcctccctattccatgagacacaataaaactgaaatcaggccaattagtaactctacaatggcctctgagtgtttcagtgaaaggaagactttcamgtctcttactttaaatcaaaagctagaaatgattaagctcaatgagtaaggcatgtcaaaagccaagatcggttgaaagctaggcctcttgtgccaaacagccaacttgtgaatacaaagaaaaagctcttgaaagaaatgaaaagtactatcctggtgaacacacgaatgataagaaagtgaaacagccttgttgctgatacggagaaagttttgagtggtctagataaaagattaaaccaggtacagcattcccttaagccaaagcttaattcagagcaaggccctaactctcttcaattctttgaaggctgatagaggtgaggaagccgcgtaacagaagtttgaggctagcagaggttggctcatgaggttgaaggaaaggaggccataataacataaaagtacagggtgaagcagcaaattattcagaagatacagctaagataattgatatccctcatcagtcggcagccatcaacatcaaggcaagatctaccagcaaaaaattacaattcactaaaagttcaggtgatttttagcatattttagcaataaagtatttttaaattaaggtgtatacattggttttttgttagtcacgatgctattgcactcttagtagacaacagtgtagtgttaagcataacttttgtatgtactaggagatcagaaaattcatgtgactcgctttattgcaatattattttggtggtctggaactgaacctggaatatcaagatatttctatacttagatgaagaaattgaggttgtctgttaattctaaccaaacaccattcatttacttgttcatacacccattcaacatttatttaacatgtactgtttactggattcagtggtgaacaatatagggaatactgtccttactgtctcaaagggaagatgattgaacaagcaatattgtaataatttattcaagaaagcagtatttgctgtgtgataccttggctacagttctgtggtaattaatgagtcatacacggtatttttattagagcaggttcctgtgtttgtttgcaagtgacaaaatcctgctctagccaacttaggcaaattgggggatttggtacccactgatctttttggagcttgtgcctagaaagagctggagttctttggaggcagagctgtgcctttgtttgaagtcttaactttttctcgattgcagaacactagcaggggcccttaggcagaccccaaggagaccacggataaaatccatgaatccatgagcttgtgaacttcagttggggtgggggaagggggggggtggggggggggaatcacctttttttttttctactaacatttagcatttcttccttttataaatgtagagaacagatcaaatgttaacagtacttgtgtctggtgaccaataaaaatcagttattttcatatcacattgtagttgtatatatctcaaaatgttattttgttcatccctgcttcaaaatgatagccattattagacctgcaacaagatcttattattgagtgaatacagaagcacatttgtcataattttgcttttgaaccgtttgataactgaatttcagtatagtttctctcttttttctagtaatttgagtattttcagtgttaaaaaggtattctgagataagatccagatgcatagggacacattctgtagaaaagattgggactccttgataacagaagatctgatattgtgtaaaaaaaaaaaaaagattgggaccccttacttttacgttcttctgaggtaccaccacccatgtatcctgagcactcctatttctkgctacaatgcagttctttcccttcactcttcctttcatctgctcaaactacttgcagagactcaactgcagccaatgtacgtccactcaaaatccaaggagttctgatkggtggggttttctttcagctgcattcacgtgtcggtcaaggcagacggcaggggatgttagacgatatgtgcgaaaccaacctactgctgctgacacatttctcattcttttttttttttttttttcttggcaggcggtggggtcaggggcaggggcagcgttgggggatggagtctcgctctgctgcccaggctggagtgcagtggtgtgatctcagctcactgcaacctccacctcccaggttcaagtggttctcctgcctcagcctcctgagtagctggcactacagctgtgcaccaccatgcccagctaacttttgtatttttggtagagacagagtttcgccatgttggccaggctggtctcaaactactgacttcaagtgatccgcccacctcagcctcccaaagtgttgggattacaggcatgagccaccgttcccggacctctctttgatttttaataactacaagtcaaggagagggcacagcaaaatgtaaaaattaggatagacatcttaatttttgtctttggctgaacaataacacacattggttcaaaaaatttttgaagtaaatataaatattcttgcttaacctggcacanaggctcttaataaacagttttttattatatttatttttctttttaaacagaaatcatgttgttgatgtcagtgttgcggtcagtactcctgcaggactcatcacacctattgtgtttaatgcacatataaaaggagtggaaaccattgctaatgatgttgtttctttagcaaccaaagcaagagagggtaaactacagccacatgaattccaggtagggtattaattattgctttctaattatgttatttttaaggtttgcataatgcatttattgcatttttcaccttttgattctgtcacgtaatttttttttttttttttttttttgagacggagtctctctgtcacccaggctggagtgcagtggcatgatctcggctcactgcaagctccgcctcctgggttacgccattctcctgcctcagcctcccaagtagctgggactacaggcacctgccaccacgcccggctagttttttgtatttttagtagagactggttttcaccatgttggccaggatggtcttgatctcctgaccttgtgatccgcctgcctcagcctcccaaagtgctgggattacaggcatgagccaccacgcccagcgtaattcttttttgaaacagagtctcactcttgtcacccaggttggagtacaatggtgcaatcttggctcactgcaacctccgcctcccaggttcaagcaattctcctacctctgcctcctgagtagctggtattacaggcatgcaccactgcacctgactaattttgtgtgtgtgtgtatgtttttagtagtgtcggggtttcaccatgttggccaggctggtttcaaactcctgacctcaaatgatccacccgcctcaccctctcgaagtgctgggattacaggtgtgagccactgtgcctggcctgccacgtaactcttattgacacaccgttctgaaaataaagtaaaattcaatcatatatccaaaagaagatattgtttgaaaataagacattttccggctgacatttttgttcatattgtaatggttgtatatcttcagtaatgtgtattccattcaggcctttcttaagaccttgcacctttttagcttaaggtcttttcacagaacatttgtcaagttttctgatttatgttgacaaactataatttatttttaattttttttcctctagggtggcacttttacgatctccaatttaggaatgtttggaattaagaatttctctgctattattaacccacctcaagcatgtattttggcaattggtgcttcagaggataaactggtccctgcagataatgaaaaagggtaagtgccaaaatggaggggaagtcgtaagctaatttttattacactgtacacttgtcctgtggtatcctcaggggattggctccaggaaccccctcaaatatcgtgatccacaatgctcaagtccctgatatgatatgatgtaatatttgcatataacctacacacattattctgtatactttattcttgacttataataatacaatacctaaacagcacttcattcacatggatccagtgtagtgcccggtgtgcagcaaattcaagttgtgcttactggaaatttgtggaattgtttactttctggatattttgatccatggttggttgaatctatggattcggaacccatggatatatggagggtcaaccatacctgtttttgagtatcagtgttttttttgtttgtttgtttgagatggagtctcactcaccctgtcacccaggcagaagtgcagtggtgccatctcggctcactgcaatccccgcctcccaggttcaaataattctcctgcctcagcctcccaagtagctatagctgggattacaggcatgtactaccacacttggctaatttttgtatttttagtagacatgttgtttcaccatgtaggccaggctggtcttgatcctgacctcaaatgatctgctcacctcagccttccaaagtgctgggattacaggaatgagccagtgtgcctggccagagtctcagttttatatatagttattggcatgctatattgtatcttcaaataaaattatatatatataaaaaatacgaaattcttcaaggcagcaactttactaaatgcagttagtcctatttgaggtggaaagccttatttattctaggtgaggagtcagcatgcttttttttagttgtatagtaagtattttaggctttctgggacatatggctgctgttgcaaataatctgccattgtagtatgaagggaggcataaacaagacaaatgaattgcagtaaatctttacctaataaaaacaggcagaggacaggatttggcccattgcccacccatactccaggtatctggtctgtttcttcaagctataaatttgagctaaaggtataggagactggaagagtagataggaagtattacctggttgggattatagggtaggagtgagcatttgggtggttactggctgaaatgcagtrttttctttcagaatatctaaaatgtctttatctttttctaggtttgatgtggctagcatgatgtctgttacactcagttgtgatcaccgggtggtggatggagcagttggagcccagtggcttgctgagtttagaaagtaccttgaaaaacctatcactatgttgttgtaactaactcaagaatttytaaactctcccaggtcacactgattcattcttaacaagatatttatatgttattaaacaggtggttctttttattttaamcagttatttttattattgagtctgtccagataagttatttataatgggcattactgaatttttaaaatgccgattacacccaaatattgtgcacatttaataatcagacaccagatttttagctctgtactcctaattaagggacatgtatgtggccttgcctagccctttggtgataagtacttcctctaggaaatgtacgataggtagaattgtggttccctaaagacaagtacataaaggtgaccctgatgaaaccttgaagttctgaaatttaactgcctaaaatgttctccttagatgtgagagaaagagaaatcagraaaattaattctcttgggggaagggcttgaattgaagctttactttagaatttagccctggtttgaaattttccattacatgatcttggtttatcatcgatgggaagggtagaaaacttcaaggaaaataagtgaaattttaaaagtcagcattttcttagacctcttcagctgattgtttatttttctatgaattcctacacatggttattcccccctacttgagataatctaaatataaaccagctacttgatgtaactgagaatttgtgtggatatttatttaaacaaatgtgtaattttgagtacagaattcaacagttacctccaaaaaagaaacattgttaatataatttaacagaagttgtgaaactaaaattttctaagattaactggtagttcattgtaaatgaacataatgaacagaatttatgactccactgtggaaaatgctatcaaataactaaggaatatatatggaataagtgtacatatgtaaaatattgttactagagttagatatgtgccaaagtccatttatcccaaatcctgtctgaaaaggaggggtacattggtaaacattttggagtgcttaaaaatgccaaaaacaaaatggtaatttctactttgataaagtaaaaaagttaaatgtgtgtaaaaaagtgttctgtgtccttctactccagcatcgtctcatgtaaaataagaaagccctaaaatactattggagagaaaaaattaactaggttgctactttatttgcctaaatacttttttctattttgttagattttgcctttcttttggaaggaaggaggcgatattctgsattataaaaatgaattgggaacattatcacaattccagactttctattaatatttatgtgttttaataaacgtttgaaattatttatgactacttaaaatgaatctgaccagtgcttcctggtatatgtaatatgtggagttagcccctgaaatttgctttaagtgtttcagtgttgaatctgtttctaaatattcattattacatggtacacaagtgacactccatatattccacacagacttttaccttgctgtattattatgaaaacaatacattaatttgatttttcagtaattagtaattttaggttgaagattatccaaaagaaacaagcttatcacaagggaccatcatcaatatgatccaaatctggttcaaacattcaaaacttcaaagataattcatctttcgctaatgcttgtggttctgttgttcccttgaaaaaaaataaaaacagttgccttctaataaacattgttgagttaaaaattaatctgagctataatctaaatcgattcagtctcttaccagaactgaaagaaaaaagttagaaatagtgtttttggttcatatgattatttaaaaattaaagtataaatcttcaatatgtctggtttaatttttggtctgttggtaattattttcacatttaaattatttagatctagggacagccatgtatgtataagctctcaatacagataaattttgagtttatataattggcaaaatatggactacatttaggagaatataatctaacacttttaagctcaaagagttcctgaagcaccccatgttggggtgtggcacttattatcaagatggaaagtgtggtctggttctgttaggtgatttattcccaattctgaagcttgtgattgtgaagttagggtatcccaaggcatggtctagaaaggagtaaaccagcacattagagagataggaggaatgttcatcatgtgtaatgcacaagtcctggaatacatggggaaatcatcatcactactggtaagtgatctaaaaatgaagtctgtagaaaaatctggtctccaaattttttttttttttttttttgagatggagtctgtgtcgcccaggctggagtccagtggcacaatatcagctcactgcaacctctgccttctgggtacaagtgattctcctgcctcagtctcctgagtagctgagattacaggtgcctgccaccacgcccagctaattttttgtatttttattagagacagggtttcaccgtgttagccaggatggtctctatctcctgaccttgtgatctgcccacctcagcctcccaaagggctgggattacagctgagccaccacgcccagcctccaaatttctaattttgagaaaaagaaatctcagtaagattccaatttaaaccagtccatagttcattattagttaatgcccttactgggccccattttgttttttgtagggaggggaagatagagctgtttttattaatacaaaatgagtgagaatattttggaaaataactagaatgtaaattttaccactttaagtatattaggtcttgatgtgcattttaatgagtatacaaacacagatactgatgaaaatagcatctaagtgctgagtgcaagggtagagattcaattctatgtggttaggagtttttaggaaatacattttggtagtgattttgtaggagtaaagataaggtgaaggcactcagtttttttgaggggtgagaataggtttgttaattttaggacatgatacagttccagaaatttttcaggagataaattatcctgttgctagtagaatttaaatccaggccaggccttcaaaaaggagatttgaggcaaggaaaaaaaaacaaaaatccagaccaggcttaagaaaattatatttgcttttaggctaggcccagtggctcacgcctgtaatcccaacacgttgggaggccgaggcgggcagatcacttgaggtcaggagtttaagaccagcctggccaacatgatgagacccagtctctactgaaaatgcaaaatttagctgggtgtggtggcagtcgcctgtaatcccagctactggggaggctgaggcaggagaatcacttgaacctcgggatggggcaggggtagggggcagaggttgcagtgagccaagatcgcgccactgcactccagcctgggtgaccgagcgagactctgtcaaaaaaaaaaaaattatatttgcttttaaatgtcatgtatcagttatttctgttatacaacattagtttctatagttaaaaagttttaaaagtagtaagaactttggcctgcatgttgaactagaaactttattacaaggataattaaaggaaacttgtatctagaaaagataattaagggatgtttaaagtctgcatatagcttacttgatgtataaattggatagttggtacctttgtatttcagagcttagaagagatgaatgtacatcacttttgtacttctgatcatttctttaggggaaaagcacttgtcccaatgtcaactactttttttgttcaaatatgagatatatttttgcaggccgggcgtggtggcttacgtctgtaatgtcagcactttgggaggccaaggcaggcggatcacctgaggtcagttcgaaaccagcctggccaacatggagaaaccctgtctttactaagtatacaaaaattagctaggggcggttgcgggcgcctgtaatcccagctactcgggaggctgaggcaggagaaacgcttgaacccaggaggtggaggtttcagtgagctgagattgcgccactgcattccagcttgggcaacaaagcaagattccgtctcaaaaaaaaaaaaaagatatattttgtttgctgttactatgtcattgtatccaatctatcgacaagtctatatatgatactaaaatgtctggctgggtagctgggtctcctggcagagttgtttaactgaagtacagaggttaggggctgagtgccatggctcacgtctgtaatcccagcactttgcgaggctgaggcagatggatcacttgaggtcaggagttcaagaccagcctggccaacatggtgaaaccctttctctactaaaaatgcaaaaactagccaggcgtggtggcacatgcctgtgatcccagctactaaggaggatgagacgggaggatcgcttgaacctgggaggcgaaggttgcagtgagccgagattgtgccactgcactccagcctgggcaacacagcgagactcagtctcagtgaagtacagaggttaaataggcttgaatattatatttgaccctgtatttttattgttggaggagactcactgatatggcccatcctgataataaaaaacttcttgcacagtctggaatttcttcctgatagaaaaatttactagagactttttcaagcagtaaaccaagagttctcacttgttacttggaaacaattagaattttcccaaattataagttacttaagatatttttaaaacaagtgtgtcatagcaataatttttaattctggttgatgtttatttgagaagaagtgagttaaaaaatataagacatggccaggcatggtgtctcatgcctgtaatcccagcactttgggaggccgaggcaggtggatcacctgaggtcaggagtccaagaccagcctagtcaacatggtgaaaccccgtctctactaaaaatacaaaaaaatagctgggcgtggtggtgcatgcctgtaatcccagctactcgggaggctgaggcagaatcgcttgagcccatgaggcggaggttgcagtgagctgagatcgtgccactgcactccagcctgggcaacaagagcgaaactcagtctcaaaaaaaaaaaaaaaaaaaaaaaatatatatatatatatatatatatatatttgacataacaggtgaagagaaaatctcagtcaaaatgaacttagaaaataatggaattggtgtttaagataaactactacctctttagccaaaatgaaggtcctttaattcacatgactttagcactgaaaacccaaaacatatgatgctcttctttcacaccaaaggcattgtgatgattagcgtggatttttctttgataaattttgctgtggtcatttcagtatcaataagttttggaagattcagatgtaatctgtacttctcagatacttcaatcaataaatcatcctaagaataataaaccaagagatttatttcctgcttaaaatttgggatactaacttattgttcccagttattcactcctttgccataaaaagatcccatttgttgccatgtgacttggaatgagcaaaaaattactgttgtaaatcccttagattttaaggtggttactgctgctcactacatcacacgttaactgatacagtaccacagtagagtgttgccatcctaaattatgtggctgaccagcaaacagcaaggaaacttattggagcctggaaaggtagtgatccatgtttcataatgatgaagcctttagtgaaactatcacagtaatttggatgataaatactctgtgcctagttgatttgtggctttaggtgaagaagtgggaaaatagatggtaatgtgttggttctgttcactacatttaacaggatattacaagaaagatgagcttagaatggaccattttgcaagtcaaattaaaagggaattggctgagtgcggtggctcacacctgtaatcccagcactttgggaggctgagggcaggtggatcacttgaggccaggagttcgagaccaacatgggcaacatggcaaaaccccgtctctactaaaaatacaaaaattagccaggcttggtggcacatgcctgtaatcccagctactcaggaggctgaggcaggagaatcgctttaacctgggaggcagaggttgcagtaagctgagatggtgccactgcactccagcctgggcaatagagtgagactgtctcaaaataaataaataaataaaaaggactttatagagccccaagattccaagactcaatgactgaaaagtggaactaatttttattttcagcaagtaagggataaaattgagaaattacttttatcaaccaagctgattaaggcaatatagaggcaaagattaaatctttatgctctttgttaaaacctctgaattttttttgtttttttttttttttgtttttttttttttgaggggagacagagtctcgctctgttgcccaggctggagtgcagtggctcgatcttggctcactgcaacttccgcctcccgggttcaagcagttctcctgcctcagcctcctgaatagctgggactacaggtgcccaccaccacgcccggctgatgttttttttgtattttagtagagatagggtttcaccatgttgcccaggctggtctcgaacccctgagctcaggcaatccaccccccttcggcctcccaaaatcctaggattacaggcatgagtcaccgtacccagccaaaacctctgactgtactaaggtggacttcagtaaatccttacatttggctaaaatgacagcaattaagtctaaagagacaggtaagtcttgaaatatgggcaatgtctaaaaaggaattatgggtatcactgactggaatcaaaatgctaccagcctggactaaaagaaactgccttcaaaatttaaaacaatcctttgagccccaagattccatgagcaggaaccaggctgaagaggctacttagcatataagaatggcacattctccgatactcttcagatgtggccaaggtggatagtgggaaagggaaaaaaaaagaaaacatcttcctgaagactgaagctaaaggtcgtggaaaaaaatggaactggggagctaggtaattacagaactttctcaaggaacctaagtaagaacatcctctacctccagaaaaggagccctcacaatgtctgcctactaggatttcagaattgctgtgcaccagtaactgcagtgtgcctcttatttttcccatttctgaattgagatggttaattacggttatcttctccccattccacattgcatgacagatgggactgagggagtacataactttttttacatgtcttagtccatggttcaagaggaagagaaagcaaaattctgtcctttggagtctgatactgggattggaggtgttttccttccagaaagaagcaaatatttgcaaccaagagtgtagactggtagactgtaggactgactctaactatttgctcttctgtaagaggatagtacgtttaccctgccatatgacttcctgtgactgtgagaatacacttctcagtcctactgatgtagaactggccttgtgacttactttggccagtggagcgtgagtagaagtgatatcatgaagtgtcatgtctgagtagaagtattacgatccactgcatggtttgatcattctattttccctttgctgagatgtga

SEQ ID NO: 95876 - DNA, 53202 bp, Homo sapiens
  misc_feature (1)...(53202): n = A,T,C or G
aagtcacacagctagtaattggtagaggtgggatttcaatctacatcttcctgactccagagtatactctcctaaccattgtatgtactattgtgaaaggtaactgagtgtcctctttctttttcttttttcttgctatattgcccaggctggagtgcagtggtgcaatcatggctaactgcagcctctgcctcccaggctcaagcgattctcccacctcaccctcccaaataactggtactacagtcaggcacctctgtgcccggctaatttttgtattttttgtagagatgaggttttaccatgttgcctaggctggtctcaaactcctgagctccagagatctgcccacctggacttcccaaagtgctgggattacaggcatgagccacctcaccaccttgcccggctgtcctatttctttgatttgctcttcccaagaattcaagcaaagtttgccttggaaatccaatacctttgttatatgtggtgatgagctgtagaacagaggtaggagatggaggagggagtagcaataatccctgattatgagttctgcacctgcttctgatttattgggacatcaggtaaagtccctttctctttgttggggtattcccacccataaaaatgagattaaaaatttgccatgaagaaaacacagaagaaaaagaaggctaaaatattgagctgaaattgaagggaaaatatttgagttccacagaatggtgacatactttgcataaatacaaatttaaaatatcattaatgctatggtgataatcactactttgcgatgaattaagtacagccctcggaatcagtttaccagggtcatcttgccaaatgaagacagttggaaaatgcttccgtgtgcctcaggtttcccgcccctgtcatccaccactcccttgatgtccctttcagggggacaacagtctgaatctgccctgagacacttacaggtctcctacacttggccttctcacacagtggggtgactgtggagcagatcagcatttgaatgagaacctatttgtaaagctctttggctgtaagggagacgcaagtttagtaaacttgaggcaaggggccagagaagatgacagtgatgtcacttcgatcctcatgactgatgcttttctttttcccagtggcgctatctcggctcaccacaacatctgcctcctgggttcaagcgattctcctgcctcagcctcctgagtatctgggattacaggcatgcaccaccacacctggctaatttttgcatttttagtagagacagggtttcactatgttggccaggctggcctcaaactcctgacctcaggtgatccaccctcctcggcctcccacagtgctgggattacaggcatgagccaccacgcccggccaatgactgatggttttctgatgtgactttgagagctgttaatgtgagcaagagttgatggccgtcgatcccatctgcctgtacttcctatattcttgatgctttgtcttataggaaccgggcaaatctaactcagtcttcctttgatccacactggatgagtgaactgcatgtgggtgtcagaactcagtgcttttgtactgaggctgtcaccttgttacctgagggctgccttaaatcctcaacctaatctcagctgttgcctctggcattccctggttattagtttcttgtggggtgtgtgtgggaagtggagaggagacctgagggaggaatagagacaggatatggaaatacctcagtgccacagtactgtattggtagtgcttggctaaattccagaagtccagcaaaagagggacaatcctttttattttatttatttattttttagagacagggtctggctctattcccaggctggaatgtagtgatgtgatcatagctcactgtagcctcgaacacctgggctcaagtgatcatctcacctcagcctcctaagcagctgggcctacaggtgtgccagcggactctgctattttctttctttttcttttttttttctggtagagacagggtcttgctttgttgctcaggctgtgggaccatcttttgaatctggcaaaacccacagcctatagattcagaattgcttattgataagtcatttgatttcttctggacacgggtggcctccaaagactttcagactctacctgagcagatgcttgtttattgacatggaaattacttttccagatgaacttttaaaatcaatggttttcaagtatcaatgcacactagaatcacccagtggacactgtaaaccatctggccccattcttaaggactctaattcagtaggtctgggttggaggccagaaatctgcatttttaacaggcatcttaagtgattcagacggtcagcctcagaatttggctcaggttttgaactagcctttttttctgctgcagtctgttttaatcaccttcattgaaggatttattagcatctccatgtttattacctgtttcattctcatagcatcacagcaactcaagcaggaacaagaggtggttagctccattttatggggtgttagggggtggaaggtgggattgaggcactgggagaggtaggtcatgatgagtcagasacagagatgggaactgaagtccaaaattgatgactctsaaaccaggcaattttctggggcctattttctcagcttgtgattttatatttaatcatagttattccttgaatcgccagttcattgtacttgggtaagcaaagcatatttgtattttaaacaaagtagtttagcatcaaggtgccagtttttgttagcatattaaggctctcttaagcttgagttaatatcgaaaacagtactgtggaactgacttaatctgcttctctctgtgcatgcttcctttattatttctgaagactttaattttttttttttttgagacagggtctcactctgtcacctaggctggagtgcagtggcagtcacagctcactgcagcctcaacctcccaggctcaagtgatcctcccacctcagcctcctgagtagctgaaactaggcgtgcactacaggcccagctaatttttgtgttttatttgtaggaatggggatctcactatgttgctaggactggtcttgaactcctggacttaagcaatcctcctatctcggcctcccaaagtgctgggattacaggtgtgagccactgcacctgtccaagactctttttttttttttttttttgagacagggtcttgctttctcacccagggtggagcgcagtggtgtgacctcagctcactgcagcctcaacctcatgtgctcaagtgatcctcccacctcagcctcctgagtagctgggactataggtgcacaccaccacgtcctgctaagtttttttttttttttttttagagatggggttttgctatgctgcccatggctggtcttgaacccgtgagctcaagtgatccatcatgtgcaccactgccccaggtgaactttttacataaagtataagaaaacagattcctcctctcaatgcctacaggaatcccctctgatcttctaactggtaaagtactaagttaaaaaaacctcttagccctctgtctctccaagttgggtagtattaaatatatgaatccatttttagcctgggcagcatggtgagactctgtctccatacacacacacacacacacacacacacgcacacacacacacgaagctggatgtggtggcacatgcctatagtcctagctactcaggaggctgaggctggaggattgcttgagtccaggagtttaaggttacagtgagctatgattgtgccactgcactccagcctgggaaacgcagcaagaccctgtttgttaaacacacacacacacacacacaacacaataattttttaaaatcctgaaaactctcagttaagtcattattattattattttagagatgggggtcttgctgtgttgtctaggatggtcatgaacccctaggctcaagtgatcctcccacctcagcctcccaagtaactgggaagacaggcacgcgttaccatgtttagctaaattgtttttattatgctgtggttatttaaatttacgaatataaagtaggaaaaatgtgcttttatttctagttcttacacagctaaaaaaaaaccacaacaaatttacaaattaaatacaaatgaaaccacaaaatgaatactattcaattaaaaatattatagtaatttaacgtgacaaatgatgtattttgctaaaactgtcatccgtcgtattgttactatggtgttgcctgctatagctcagcttcttttgtgttcaacatgcctatgccaccaagtgactcctgatatcttaattttctcaccatttttctgttacaactaccaaatagtgcaatctcatgatgcatttggctttcattttgtgcatgaaagtatcattgtcattttaaaaccacctctgttcttttctcattatcccagaacaataaaagcagcactaaaacacacatgtaaatgtgggtgctgaaattgtgtggcaatacttggttgtaaggtggtcacccaaataattcagaatatgcttatacaaatctaaaaaatatgaaaatgaaaataaaattaaaaccctagagaatacattcgcagacataatttgagaaaaactgttcaggtctgctggttcccaaactttcattactatcaaaggctctagctattgtgcttacttccaagaaccccatttatttatttatttatttatttatttatttatttatttatttattcattatttcattcattcattcaaaggctctattgtgcttacttccaagaacgctatttatttatttatttattttagagacggggtctcactctgccgcccagattggagtacagtggtgcgatcctggctcactgcaacctctgcctcccgggctcaagcgattctcatgtcagcctcccgagtagctgggactacaggctcccgtcaccagcccagctaatttttgtattttttagtggagacagggtttcaccaagttggccaggctggtctcgaactcctggcctcaagtgatccgcccgcctcggcctcagaatcccatgttttaaaaaagtttgtctcctacactgcatttatagttttattaatcaggcacatagaattaccatttcggagcttgtgatcaccatatgtagttatcactccaagctgcttaaattccagtctaaaacaaacaaaacattctaattattctgtgctaccctgacaggggtaagtgaaaactttccattcaggtttgtaagaacgagctcccagacctccacctcttccccttgctgcctctgaggactcttggaggtctagggaggccagtttgggttttcttgctcaagaaagtagccaccccacccaatttggaaggattaaagcttgtcctagttttgcttcattgttgtacttctagcatgctaaagagctaaaaaatgggaggaagaaaatacaacagaaggcaccattccagtaccaaactgaaaagaaacacaaaaacaagagagcagcatgtttttaacagcttgcgtggaaaaaatattgactggggagtttggacagcactgttcattttctctcaccgcccgcgttatttgtcttacggagcaggagccagataccattctggagaaagagccgcgggaagaggtggaggggttctgtggaagtttgagtctgagcggagaaattagggctggagatccagtggctcagggccaggaagaagtcaggggaggtgctaaagcctttttcctcctggcctcgggcactctctttggtccgcctgagtcttaagagggcacagcgcagatcattcaggtaggttcctggctccttcagactacaacgagctggatgaatccctgtccctgtttctttcggctggggaaaggacgcaggggttccattcgctttcttagcccacccgtcttcttgagttcagacctacaactcctgcagtgggggtcagaagggagccttaatcatcgggacagaaackcggctccccaacttcggctaaaccagcgtggcggccttcgtccctactgcctgggcgcggggcggggcctgggcgcggggcggggcctgggcgcggggcgggaggcggtgaccagcagcaggaggagaaagaacatggcgggcgcatcagagctcgggaccggcccaggagcagcgggtggagatggagatgattcgctatacccgatcgcggttttaatcgacgagctccgcaatgaagacgtgcaggtactggactgaggccggggacccgaggcgagaccggctggtcgcgtggtagagaagggggaaggcctgcgtcgcggtgggggtggccgaggtactgaatgagtcggrctcgtagcagaaacttgaaggggaggcggggaatgctccgcgaggggctgtggtgacacgccccgaccctcccgggtacctctctagtaaccttgcttcggaccccctgaggcgtccgcccggagccttgcccttcccgggcsgttgtcggggaacccgcttcccgcctgggcgccccatccgggccgtgaggtggccgcgtctcttgggcgagggagcaggagaagcgcggtgccmggccgagacggggctggagcggctgaggggcgcaggatgcccagaagccctttgaagtgcccctggatcccttcatctcggcttggaactggctcggcttgttgggtagaaagcgggggtgggatggccgattaatctggacgagtagtgtatccgctctgtgggaacttttctttgaaaccacaggtgttgtattcaaccgtttcacctgcttcaccactgccaaagtgctctctttttaaaattatcttacttcctaggtgttgtattgtctttccttcatttctcttccggtcccttctgagtgtttctcctgggaaatcctccgccggctagtgaggccgagttacacttctttttggaagtccttatgagcttccttaacagtaaaatctaaatgaaaggttatcttcattcttacccctgtgtcataatttcacctgttagcaccttttgtcttttgatctaaattcagccgtttctttacattgttcttctttctactttcttttctgaagctccgactcaacagtattaagaagttatcaacaattgccctagcacttggagtagaaaggacccgaagtgaattgttgccatttcttacaggtatgtgaatctttgtttaaagaaaggtagggacattccattttccagtagctttcaacactgacttttttagagtttattacccacattaaaatgagccaggtgttttttgtgcaaaagaaacagaacagagtatattgttagttgtggctagatatattcaaacatcaaccatttagctrttgaaagtaattgatacgggagtatgaatttctaattcgttgtgcaaagcagatacaggaagacggttgagaagaaagaaaatgctgttaggattttgactgggtcaccttcctggtcgcatagtgaatctgttcctagttttgtgtcagtgtccagctgtgggagagctatccatgttgrtgagtcctgttgttgtcacttccagatacaatttatgatgaagatgaggtactattagctcttgctgagcagctgggaaatttcactgrcctagtgggaggtcctgactttgcccactgtctgctggtgagtatttataagctgcctaccctccttctacaacttttgcagtataaatgatacattgtttggtgatagacacactgcagcattttttatgcagatctttttatgggcagatagtcataatgttagtcattgagagaataagtactgtaggcactttgcactcaactccttttttttttttctgtaaataagagaacttcgtcctccttttctgcgtctgtagacttattagtttagatgtagggagaaaaagggtttgattgtttttatggttcccccgcgcgatggtggaagttttaattctcacctagcagcattttgtctttgtcagtttaacttttgcttctgactttgtgagtttgatgaatttagttcaatttaattgacatttattgagagtctactttatcagacacatcatagtttacaatgttaatgttgaagaagaccaatgtgagggggcttggtggcacaagcctgtagtaccagctactcaggaggctgagactggaggatcacttgagcccaggagtttgaatccagcctgggcaacatagtgagacccccatctcttaaaaaaaaaaaaagaccaccaaaatgaatctaatgaggtcactgcctttatgtgtcagcaaataattaccgtgcagtcgtaaatggaaagatataagtacccacaaaatacccacgtaatagaagggagaaagggattcactccgggtgatcagggaagaccttgggagatgatgtctgaactaggttttaaaggatgaccaggaattcaacagttggacaaggtaggggtgtatgtgtcagagctttgaatactgggtatgtaatactgattcttgtgatttctgtctctagttctgacttttccatggaactcctgaggtagattgattaatagataagtatgaatatatatatatagagagagagagagagagagagttttttttctgtctatgtatataggcctatgcttttttctacttgtatgtsaaacaggtatttcaaacttaacatacccaaaacaaaacttagctttatcccccaaatacacctctcatttagttgttccacttcagtaaatggtatcactatcttcccacttgcacaagccaaaacctagaatgtattcttgaatcctctgtgccttgttccacacatctaatccattagtaattcctatagagtctacgtatatttcaaataagtccactttcttccatccctcctattaccagcctagtccagactgtcatctktcctctagattgctgtagtagcttcctagcaatgctttccactcttgcctctcacccgactcttacagttcacatcacccagcagatggctcactctctgctatagctcttagaaaatccaaattctgtaccttagcttacaaggctttttatgacccgcctctgtaggattatcatatgcccagtggtactgcatgagaagaggtgacagtaggcagggaacagactgcaaaaggccttgataacctcttccattcacattggtcatctttctgttttttgaactaaccaagctcattattcccttaggacctttgccctaggtcttccctctaatgaaaagctctttcaagctttctgtggctggctccttgtcattcagggatcaacttcaatgcatctcctcagggaggttttccccaaccactcaacttaaaatagcctcacagtcatcccttactacatcatcctactccttttttctatagagtactcatcaccatctacttattttcttgattgattgttgtcttactccattagaatgtaaatgccactagagtgaggaaccttgtctgccttgtttcttctgtgtcctcaatgctagaatataccaataataatgtattgaaaaaatgagtttcagaggcttggaagcatgaaacaggctgggttcaaaactgccggagtgtggctgggtgtggtggctcacacctgtaatccttgccttgggaggccaaagcagcaggaggattgcttgaggccaggagttcaagatcagcctgggcaacatagtgagaccccaacacttaaaaaaaaatagctgggcatgatgtcatgtgtctgagtcctagctattcgggacgctgaggcagaaggacgaggagtctgaggccgcactgagccatgattgtgccactgcacttcagcctgggcaacagagcaagaccctgtctcttaaaaaaaaaaaaaaaaaagaactgctggagtgtgaagtgttgaggctgggtaggcagagtggtcatcaagggccaggcagagttcaaatcaagagaccactcataagcaattctcaggagcatggcctcatcctgtagtaatgatagctattatccagtggtactgcacgagagggggttacagtaggcaggggacagatcatgaaatgcattggcaagtgagaaacagtatcttttcaatgagtttctgaaataccttctaggaaagctgaatactgtctrcctgtgtgtatcaaacaatttttaaaatatattattagacacacttcttttctttaactcattatgcttctgtttcactcttggttagttctatatgtgggttttatgctttaaaatctgtagctcatggcatgtgtagaatctacctggactacatgcaaactcagtaaggcagaggttcagagagccagcctgtttacactttttactaggccatgccatattcagttactgctcttaatccagaccatccaccccatttggcttcttttatttctaaagctgtaagcaaggtgtcctaccatctctgtactttaccttttttttttgagacaagagcctcactctgtcacccaggctcaagtacagtggcacaatctcggctcactgcaacctctgcctcccgggttcaagtgattctcatgcctcagcctcctgagtaagctgggtttacaggcgtgtgccaccatgtctggctaatttttgtattttttgtagagacagggttccaccatgttggccaggctggtctcgagctcctgacctcaagtgatctgcccacctcggcctcccgacggctgggattacaggtgtgagccaccgtgcctggccagtctctgtagttttcacttgattgttctgtcagaaactcctttctgccctatggctaatggaaagttgctgaatgtgttctgaaaaaagcaattttgcattcagcattttataggttggataaaaggatgggatggagatggtggataagggttgcttgcacctctgggaatggtggaaagatactgaaaaggctgtggactcagtgacctgacaagctgttatcctgtatttgtggtgcctaacattggtcatagttttgtacttactcttgaggaaatatacatgatcctgtctgaatttggctatgtatcttttaaacctagtgattcaactcacagtaatattaatattgtgtcaagtcttttacactgtgtcatttgtagacaccatctgggaattgccatctgggacacgagatcttggcttttctacagaagtcgtgtctttgggttggccgcaccatatgttatcactgtgtgagctgaaagtaaccatttggtatgatgcagctaacattctggttacgtgtaccacctcccttcagtcactttaaaaggtgattatctgtttctaacctgattcaataagttttcttctctggttttcctttttaatccattcagcctcctttggaaaatctggcaactgtggaagagactgttgttcgtgacaaggctgtggagtccctgagacagatctcccaggagcatactcctgttgctctggaagcttattttgtacctctggtgaaacgcttagcaagtggggattggttcacctctcgcacatctgcatgtggtttgttcagcgtttgctatcccagggcatcaaatgctgttaaagcagaaatcagacagtaagccatggtatttttttgccttgttaaagcagaaatcaggtagtaagctatgagttatttgggattactggggacttgtagctgacaatttacatagtaccttgttaccaatgagtggctgatactaggatagtaggatttatgacatctttcttttttktttttaagagataaggtcttgctctgttgtctaggctggagtgcggtggcacaatcatagctcactgcaaccttgaactcttgtgcttaagtgatcctccagcctcagcctccaagtagctaggactaccgacatacactactgcgcctggctaatttttaaaaaaaatttctggctggatgcagtggctcatgcttgtaatcccagcactttgagaggctgaggtgggaggattgcttgaactcaggagttcaagaccagcttgagcaacatagtgagaccttgtctctactaaaaagaaaaaaattagctgggcatggtgggacccgcctgtatttctagctactcagaaggctgaggtgggagttcacttgagcccccsacaaacaacaacaaaaatatttttggcatatagatagggtcttgctatgttgcccagtctgctttcaattcctggcctcaagcagtcctcctacctgggcctcccaaagtgctttgattacaggtgtgaggcaccatgcctggcctatgatgtcattttttattatccagttgaatatgttttatttttgttacttctataagtagaagcttagtcactgattattgtaagataaaacctctaaaagtctgtctgtgtgtatggggggcaggtttattcagtgttatttgatgggaaataccttcattgttttatgttgcaggcaattccgttccttgtgctcagatgacacaccaatggtacgacgtgctgctgcttccaaattgggtgaatttgcaaaagttttggaattagacagtgtgaaaagtgaaattgttccactgttcactagtctagcttcagatgaacaggtaaactaactcttagtatttaagggacacagatatgctcctttcctctaaattttcagaatttctttggggagttttagttttcttgttaggattctttttacagaattagtgctgattctggcctggttaaagtgtaacatgcttatctcaatgttcttatgtttctttcttaaccagaccatgatttctctcttacattagcagctgttaaaagagtggggagtcagagaggaaatgggagccataattagaaaggaagaccaaagctgcatggagggtaacatacctttgggaattgctggctgtattgtaatatgagggagtaatgtttcctggaatttttgacttttcagataaataagcttagaatgtgttaggaaagctatttgactctctgcttcttctatagtagtgtatgggattacttcacataatcgtattcaattctgaagatctagatctctttggtgtagaaataacaataaaactagcaaacatccaaatgaagtacttaatttttctctgcctttaagtagttatgtgtattaagtaattcagtccttacaacagccccatgagatagcccattttacacattagaaaacaaaggcacagaaagtttaagtaacttgctgaagtttgcatagttagcagtagtggagtcagaatttgaatctaggtggtttggctccagaatttgtgcccttcacagctaggctgtcccgcttctctgtaatggtgcttaataggatcagctcccagagttcctggactctagaatmgtccttttgggcttttaatttgcatgttgcctgccctaagatcgcttcatgtgtacaggaccacaagccccaggacacatattaatgagtctcattttcagatcctaaatctaaagatctaaatcctactttgaaaataattttaaaaattattagaatttttattctaataataaatgtacaaaatgaatgtataacttaatgaactattagaaggtaataccaacttgttaacgatcacctatgataggagacatcactttgacagccactatcccagaatccctccatggattccctttcaaacacaatctctctttcctcctccacttgccactccatttccktaagagtaacattatcctgacttttatggtaagcgcagcctttgttttctttgcactttttcttttcttttcttttctttttttaaaaggagtctcactctgtcaccaggctggagtgcagtggtgcaatctcggctttctgcaacctctgcctcccgggttcaagcaattctcctgcctcagcctcccaagaagctaggactacaggcgcatgccaccacgccaagctaacttttgtatttttagtagagacggggtttcaccatgttgaccaggatggtctccatctcttgaccttgtgatccgcccaccttggcctcccaaagtgctgggattacaggcgtgagccaccgtgcccggccttctttgcacttttattacctaaatgttatagtttaaaacagtgctttacaacagaaatataatgtaagctacctgttgattttaagttttctactggccatgtttttataagaaaaaagaaataggtgaaattaacaatatttgtattcgaccaaaattttccaaaatcttattatttgagtgtaaataacgtgtaccagccacatttcaagtctcagcatgagatgatgttgttaatagggtggtagtgaagatggaaaggatttggatgtcagtttggaagtgggatcaataggttagtattattggattggatcagtgggagaggaatcaagatctcctagattttttgcttgagcaactgggtggatgatggtgtcatcgttaagatagagaaaattctgggaagaggaacaggtgtaggagagaaaacgaagttctggaagagaagtaatttttttttttttttttttgagatggagtttcactcctgtcgcccaggctggagtacaatggcatgatcccagctcactgcaacccctgcctcccgggttcaagtgattctcctgcctcagcttcctgagtagctggaattacaggcgcctgccaccatgactggctaattttttgtattttcagtacagatggggtttcactgtgttgggtaggctggtctcgaactcctgaccttgtgatctgtccgccttggcctcccaaagtgctgggattacaggtgtgagccactgcaccagaccagagaagtaattttttaacaaatatgtattagcttatatttcagtagttgattagcagtcccatgatttagcatcattttcgaaattcaaaaatatctgtgtagtcactaccaagaacttagtcctgtcttttttagcctgtgcacctgcatacagaggaatgtgtgtgtctttggcatatagtcagttattgttgatacacagtttctaagatttgtaatattttggaagttggagtcactgttatgtctctcaagtatgtgtatacgtatatacataactgttattgtacacacttaaaattttttacctatttctcctgggtgctaatgtttacatgtattaagattctaccttatatatgtataatacacaaatctacagtctcaatttctaatttctcattgatgtttcttttttttcggtgtttttttttttttgagttggagttttgctctgtcacccaggctggagtgcagtggcgcgatctcggctcactgcagcctctgcctcctgggttcaagcaattctgctgcctcagccacctgagtagctgggattacaggcacgtgccaccatgcctggctaatttttgtattgttagtagagatggggtttcaccatgttggccaggctggtgttgaactcttgacctcaggtgatccgcctgcctcggcctcccaaagtgctgggattacaggcatgagccactgtgcctggcccctcactgatttgtcttgtatattttccacttgttcaaaggacgtaggtgtcacgttgacattggctgtttacatttggaaagttgagttcattaatcccatacttttctaatttctgtgtttttctagccacagcttcctcaaagttattctgtccttgatcttcgacatttaaatccaactgatttttgtttttgatttctaacttttaattgttctgtgtatttctttccaagtcattatcttatgctgcctacactcctgttactgcgaccctgatctgagttttttgaaaactaagctttctaagtgatttcctttactcttactcttacctttgtcctaatctgttataaataacttgtacaaatattgttttcatttttatccctcaactttctgttatagtaaggctttgaaggcatcattaaaatgttttttttttcttttttacttaattttaaaattttcatttcctttatagaaactctgcattctagccaaggtaattactttgctgtttactcatagtacaaagtcatttctatctttatgactttgacatgccattccaggcaaagggagcagctctttcttttttttttttttcctttttgttttttgagacagagtgtcactctgtcgcccagactggagtgcagtggtgcagtctcggctcactgcaagctccgcctgctgggttcacgccattcgcctgcctcagcctcccgagtagctgggactacaggcacccgccaccacgcctggctaattttttttgtatttttagtagagatggggtttcaccgtgttagctaggatggtttccctctcctgacctcgtgatccgcctgcctcagcctcccagagtgctggtattacagacgtgagccactgggcccggccgggagcagctctttcaagatataaatacacggccaggcgcagtggctcgcgcttgtaatcccagcacccagcactttgggaggccgaggcaggtggatcatttgaggtcaggagtttgaaaccaggctggccaacgtggtgaaactctgtctctactaaaaatacaaaaattagctgggcgtggtggctcctgcctgtaatcccagctactcgggaggctgaggcaggagaatcacttgagcctgggaggcggatgttggaatgagcggagattgtgccactgcactccaatctgggtgacagagtgagaccctgcctcaaaaaaaaaaaaaaaaagaaaaagatgtcaagacgtgaaactatataaggtgtggcagtcttggtggtgttaatttttttaaacacctgcaccaccccacagcagttccccatgggtctcagtaaatgtctgaattacagaaattttgttcctttaggattcagtgcgcctccttgctgtggaagcttgtgtcagtattgcccagttattgtctcaggatgaccttgagactttggtgatgcctacacttcgacaagcagcagaagataaatcttggcgcgttcgctatatggtggctgacagattttcagaggtaaagtgatcatttttaagtactaaggaaataaacctgaaaacacatagatttgctgttgtacccaaagtttctgaattaattcttttcaatgggaagtgctgtggcaaaaatatgtatttacagattgcacaattttgttttgttcttgttaattcttttgttagtatacattaaaacccgttcaaattcttttatagctccagaaagccatgggtcctaaaatcaccctaaatgacctcatccccgcctttcagaacctacttaaagactgtgaagctgaagtccgggcagctgctgcccacaaagtaaaaggttaaggagttcaatttatgttggaacatgtgtcattcattttggtgcatttttttgttagtcaattttgcatgttttttgttctagaatatgtttttaaaatacatagggatgtttttagtgtgtggaaatgttacnttgtcacttaaagatagtctctttatatttaaaaccaagaaatcattttgtcttgtttttgtaaaaaaaaaaatgcctttcaggttggattggtgtgatatgcaatggcatagagagttcacgaaaaagtttatttagaacaagagctgttttccttatttgcttaaacatataatttaattgaaattattgataaacctggttaaatgtcctcatttggctctttgtaaatggccctgtgaaagcattctttttttctatttatcttttagaacttggtgagaacttgcccattgaagatagagagaccataattatgaatcaaattctgccttatataaaggtaaacctgactttattttgtttcactctcttttatatgaaggtaaaccttaatctcattatttttgtttgtttgtttaccttaaagctctttgagtttaaaggttgacagggaatgaatggggaagatgtgttaatrtgcaacattgttattcatcacttattagcccattgtaattgtaaactgctctttggtgcataggtttatgttacctaacaagtagtctgaggaaacattatcaactaatcagtattgaaatagtgctgtctttaaattccttggggtcaggcatggtggtacatgcctgtaatccaagcactttgggacgctgaggtgggaggatttcttgagcccaggagtttgagaccagcctgggcaacatagtgagaccccattgctacaaaaaatacaaaaattagttgagcctggtggcatgcacctgtagtaccagctacttgggagtctgaggtgggaggattgcttgagcccaggaggttgagatggcagtgagctatgatcatgccactgtactccagcctaggtgacagggtgagacactgtctcaaaaaaaaaaaaattaggccaggcgtggtggctcacacctgtaatcccagcgctttgagaggccaaggtaagaggattgcatgaacccaggagttcaagaccagccctggcaatgtagtaagaacctgtctctgcaaaaaatgaaaaaaattagccaggcctggtggtgcatgtctgtagacccagctactctggaggctgaagtgcttgagcctgggagggtgaggctgcagtgagccaaggtcacgccactgcactccagcctgggcaacagagcaagactctgtttcccagaataatggtatggaagtttctgttgtcttgtaataaaggcttttaatttcgattttattttaggaattagtatccgataccaatcaacatgtcaaatcggctctagcttctgtaattatgggattgtctactattttgggcaaagaaaataccattgaacatcttctacctcttttcttagctcagttaaaggatgaggtgggtcttgctttatgttctgttgcctttgatagtaatttgattttatttgattttggtttagggtttcattaaaatagaacccccaaaaagaaaatggataaaaaaatcataacttattttaaaccaatgacacctgtgattttgggtatggggttataggttcctcagaaagtgggcaaaagtacccattagagtaaacctagaaatatctgtttatcatctttacctgatttttgctttatactccctggtttctttaaagctaatgtgtctttgtttaaaaagtttcatttatttaagtttaaatatagtatcaaaaattataatgatacctaatatttactgagtaattactacatggcaagcatgagccttagtgctttgcatgtatttttacatgcaattctcacaacaatcctgtgaggtaggtcttattattatccctttttgtttgtttgtttgtttkttttgttttttgagacggagtcttgctctgtcgcccaggctggagtgcagtggcgcaatctctgctcactgcaagctccgcctcctgagttgatgccattctcttgcctcagcctcctgagtagctgggactacaggcgcctgccacagcacccagctaattttttgtatttttagtagagacggggtttcactgtggtctcgatctcctgacctcgtgatctgcccgtctcggcctcccaaagtgctgggattacaggtgtgagccaccgcacccggccaattatcccattttacagatgagaaagctgaggcatagagggttaaagtaacttgagcaaggtctttcaacaatgacagatctgaaatttgagtgcatctgatttagttccagagattatgctctttaccatcttacggacttttcttgtagtctttagtattacggacttttaattgaaatttctgattaagatcatttatgttccttgagttatttatgtattcactattatttcttcaagattatccatttttttttcacctgagtcttacctcaccttttatcttaccctgacaggagactgttgggcagagtacttgatttttawatgtggtcttttggggcttgtgtacttgcagtgtcctgacgttcgtttgaatatcatctccaatttggattgtgtaaatgaagtgattggaatccgtcagctctctcagtctctccttcctgccatagtggagctggcagaagatgccaaatggagggtccgcctggccatcattgagtatatgccgctgctggcaggccagctggtgagtatgtgttgctccatgaactgcagggtagtgtcagatagtgacaatttaccatggcaagtaggaggcctagtagcctgtatgcttatgtttgtttagatgcatgaaagtatggccttgttcttgttacctataggatggtttttatgtttgttagtgcatacgtttcttttcttttaagatggagtttcactgttgttgcccaggctggagtgcaatgatgcaatcttggctcactgcaacctccacctcctgggtttaagcgattctcctgtctcagcctcccaagtagctgggattacaggaatatgccaccacacccagctaattttgtatttttaatagagatggggttttaccatgttggtcaggctggtcttgaattcctgacctcaggtgattcacccgcctcagcctcccaaagtgctgggattccaggcgtgagccactgcatctggcctattagtgcatacatttctaacaaaaaggtataggttgagtatccctcatctaaatacgcttgggaccagcatgtttgggaccagaagtggattttggaatatttgcattataaatatttactggttgagcagcccaaattcaaaaatgcaaagtccagaatgctccaatgagcatttcctttgagcatcatatcagtgctcaaaaagttttggattttggagcatttcacattttggatttttggatttgggatgcttaatctgtattacagaaacatatttcacctcatcaccaccgaaaaacaaagccatagaataatcagtttcttggtatatataatgtaaattttataatatttaatgcctttgtgacttaagaaatgtttaactgagaagaaaagggattatggttttagggtaagtctgctgtgatttttgctcaaggaaacttccctgtttgccttgtattctaagcaaaatgtccctaggtaccacttgccctacattctgattaaagggagttgaggaatcaccatatagaaaagaagtattgaaaggccgggcacagtggctgacacctgtaaacccagcactttgggagccagaggcaggcgaatcacttgaggctaggagttccagaccagcctggccaacatggtgaaaccccatctctactaaaaatacaaaaattagctgggcacggaggtgcacacctgtaataccagctactcgggaggctgaggcaggagaatcgcttgaacccaggaggcgaaggctgcagtgagccaagattgcactactgcactgcagcctgggcaacagagtaaaactttgtgtcaaaaaaaaaaaaacaaaacaaaaacaaaaactgaagcttgtaatgttagtattttggtcaaagtccacattatcacattatctgttactgtttgagtttcgtgatcagtgttaccctaactaataccatgttagttaaaatttcaaagctgggttttatagccacatcctttcctttttttgagtaggtggcctagacagttctaagtttgatgtaccttcatctctgttggtagcacttattacagagtattgtaattgtctgttacagtctagttggagagatgggtgatctcttttagggcagggactgtattttatttccagtccctaccatagtgcccgtcattaattaggcacttaacattttttattttgggggcagggtcttgctgttgcccaggctggtcttgaactcatggcctcaaatgatcctcctgcctcggcctcctgagtagctgataataggcatgagccactgtgtatagccaacatttgttgattgttgagtattttttgagaaagatgtgtcagtttactattgacatcgctacagtttgtttccccttcctcactcccacttccattcctttcaggtcacaacatatggaatttattttttcttgtcttgaacccctgaatttgtatttttaattttagtacatttagtttatgaacatgcaatttgtggatgtctgtggcattatatgttttataaaattgaaagtgtccgattctttgaaaagtataccagaggtattagtgcatggcaaatgggatcaggtgaagttattttgtcatcctttttgtctgtcactcccaagtgctatgggtcatcttctcttcactggtgattgtcatggatctacttttcagagtggagaggagcagtgattaactgatttgctgaagaccaaaactatctggaagggagggtgcattttagtaccatttcttttaacctctgctccttctagacctggaaagtttcccagggttgctagctctatagagagcagtgtgaaagcaaggcagatggtgtctttggctgacttacacctgtctggcaggggtgacatgcctcagtcatraacattttgctttacaattttaacttcttgttagtatatatattctccttaatttctcttcatatctaaatatttttatatcagatagtcattttataaaattctctcaagactttatgtatgacctggcttgtggacgatgttaagtaagtgtaaagttaaactacaaaaaccggaaaataggccaggcgtagtggctcacgcttgtaatcccagcactttgggaggcctaggtgggtggatcacctgaggtcaggagtttgagcccagcctgaccaacatggtgaaaccccatctctactatacaaaaaatttagccgggtgtggtggtgggtgcctgttacttgggaggcttcttgggaggctgaggcaggagaattgcttgaacccaggaggcggaggttgtagtgagctgacattgcaccactgtactccagcctgggcgacagagagagattccgtctcgacaacaacaacaacaacaacaacaaactggaaaataaaagttaattaaaactgaaggaaaattctcaacctgaaatgaaaaagaaatcttggctgacgtaatctaagtgtatgccaaaatttgttcattatgatcttttagtacaaagcaattttgggccaggtgcggtggctcatgcctgtaatcccagcactttgggaggctgaggcggacggatcatctgagtcaggagttaagagaccagcctggccaacatggtgaaaccctgtctctactaaaaatacaaaattagctgggcatgtgctgcatatctgtaatcccagctacttgagaggctgaggcaggagaatcacttgaacccgggaggtggaggttgcagtgagctgagattgtgccactgtactccagcctgggcaatagagtgagactccatctcaaaaaaaaaaagctattttgtcttattcaatcactattttcaaagcactgacacattatattacctctctttttttaaaatatagaatcaccagtcaggaacttcttagagttcaaagaagcaagactgtaaatgtgtagaccccagaagggaggcactaggaaagtgtgtcacagcattctccatgtggtgtggaagccccggggttagaggactgtgtaaatctgctcccggagcccatccccagcctgcactgaagtggccacctgttgacagtcgggaggaacagggctgggagagcaagccatgcctgggccatatgccctgtagtcctgggcctgctttattctccctccagggctttctcctgttgtctcgaaaatactctctttaactggggatatctctatgtcttgaggtcagttgctttatccttaaggatttgtcataatagtaaccaaaaagggaagacgattgagaattagtaatattactgacaggtgttttcctgggtaattcatttttacaggtaatccagatttgcttggcagaccatacacagtgcattcttcctgctcttttgcagtgttgtggctgacttctggccaccctgttctcttttacctagcagggcctatgccagctcacgtatgctttttttttgtttatgatttccgtccaataaatagatttatggtttgtttgtaattcctgtggtgtttctatctcttatttgtttatttggaaacaagtttttttagccttcaggtaaccttggtgtaatgtaaatagaccatctttatttctgaattttggcaatgtatgttaatggaatcttctgtatctgtagggtgtggaattctttgatgaaaagctgaattctttatgtatggcttggctcrtggaccatggtgagtagataaaaacagattattgaaagcccatatatccatgattttcatacatttccttttagaaaggaatctcagtctgaccagatattttgccttaatattgtaggaatgaagaaaggctctaattaaagtttaatcttctgaatataaatttgacgtttctaccaattttttgtatcttcgattttattttctccattaaacaatttatttgcattattttcttactcaatctattacattatcttcagaccatctcttttatatatctacttactcctcccttatctgaagatcctctttttgaccatcctgtaattggtgtcttcagcagctatacactaggttgtatggagattggaatcagatgaaaggcctgggtgggagaaatggctacttggctttttgaggtgacatagaagaggagatctacagtgagacagtagaggattcttaggtgtgggaaacactagctttgccatagggagagagagggcctggatttctggtttgggtgaaaggaaggcttactgcttgtactctcactgctgctgctacagtgctaggagagggtgagctcagggcaggtcagataggacagcaggaatgagcaagtgacttcctggtgaggcttcaggtagaggtatatgtgtgtatccccttgtgtgccaggcagcagtgggtgacagatgtaccgtctctgccagatcccaggtccagacttgacagcttcagtgttgtcttagacctgtttcgatgagtgtgagtgcccctatggggtcatgtgacattgtccttgagctttgtttccatgttttggtggatataatagataacctgagtcagttccrcagtatcttttatatacttgatatatgtatttagtgtatctctttgttcatctatgggtgcttatgcctggaaatttgggaggaatgaggatatttgtgtctgcttatacgtgtgggtggttttgttaaaggcatgtttgcatcatatggaggatcatatggttaagagtgtgaagaggaaggatgtgaaaaaatatgtgaaaatgtataagggcttatatatgtgggtatttccagtgttttcaaactggattgtagacttctttctctttttcttctctaaagttatcttattgtggcctatttatttctttttaaataaaattaaaatttggcaaatcataggraagaaataccacttttaaaaaaaatgtttatgttatatctgataaatatttgacgttactgggaatggtgcatcctagcaaatcattctgtgcttttttaaattttattttactttaagttctaggatacatgcatagaacatgcaagtttgttatgttacatagatatacatgtgccatggtggtttgccgcatctatcaacctgtcgtctaggttttaagccccacatgcattaggtatttgttctaatgctctccctcccctcgcccctcaccccctgataggcctcagtgtgtgatgttcccttccctgtattcatgtgttctgattgttcaactcccacttattagtgagaacatgtactgtttggttttctgttcccgcgttaatttgctgagaatgatggcttctagcttcatccatgtccctgcaaaggacatgaactcattccttttttatggccgcatagtattccgtggtgtatatgtgccacattttctttatccagtctgtcattgatgggcatttgggttggcctcaagtcattctatgctttctttaaaagttggcattttagattaagatggtgttttattttgaggaatttttaaagttctaatattccacaaagaattaaattcctggcaccctttctctgtaagattgtcttctctatgcaacttgattactccttcctcttttcggattttctctttcagtttgggagcaggagaaacccttgtttatttcactgcagcagcatgctgaagtggggactgcaagagttccatgaaccaatgaaataacagctctgaaattgttttgtacttaatcacaggagcttttttgcttttgcatttcagataagtgttatataatgatcactggatcagttagagtttttgaaacttttcccctagttaggtaactactaaaagaacattgtgaaaattccagagaagtataaggaagaaagtatcactcacctatattcctgtggttgagtagacagttttgatcagagggaggaatgtagaagggaaatttatttatttattataggagaaaggagaaggtatcagttattgagcatagatagacattcaaagaaaccttgcaggtcagccaggccttgagaggagatggggagagagaaagagacagaaatagacaaaagaaaacaggcagaactctggaatggtttgcattcttctgaaaacagtcagaggaaccaagaacatagtaggcatctggccaagtagagttcagtgcagttaaggtcttggtcaaggctatgcatgtgtgttccccagtctctggtttttctggcagtagagatcccttcctatggtaatggcattatgataaaaatctaaagcgtgttaaaaaaaatagtaatttgctgagcatggtggctcatgcctgtaatcccagcactttgggaggctgaggcgggtggatgacttgaagttaggagttcgagaccagcctggccaacatggtgaaaccctgtctctactaaaaacacaaaaattagctggatgtgttggcgggcgcctgtaatcccagctactcaggaggctgaggcaggagagttgcttgaacccaggaggcggaggttgcagtgagccgagatctcgccactgcactccagcctgagagacagagtgaggctctgtctcaaaaaaaaaaaaaaaaaaaaattagaggagaagacacaaatactctagctagctcctctttagtggggaggacagggaagggtttgggccaaagacaaagactatggatatgaagggaaggaatctgtattacagtaaaacagttgacttgagtttgctccttagtgcatctgagtcttaccgaaaggttgcttctcctgtagactgtcagtttaagtgttgataatcagttgtatgggtcacttgtctatgctgtcttgcttgttctcaacatcattgcccagaaggatctatgaatagaagaagttgcctatttcttggttggaggcttgtataaattgcctaggactgggactgtggcttggatagctattcctgcccttcctatcatcccaggaaggttgggcccacctggggagagaagtagaataaggaattagtacctaccaccctcgatttgttaatctgagcccaaattttgagtcttactggatctgtaaagtgaagtgacaccaggcttgtttttgttcagtgctgtatatagcaactaattgtgagaggattgtagctgagacctttattatctagctttatgtctttgataaatgatcaaaggatatagggaattattagatgttaaggcaggcacattgattcaaagacatttgacatcttgtttcaacctaagcattttcatggagaggaagcaagtcagtctgatgtttgtatttgctgttgtatagatgaccacagtggcctctacaccatttccttgttgtctttctcagtcaacgtcgcttctccgtgatgttgctggaataatcttgctaaaattccacattggtcatcaggtcacaagtttgctttaaaaacccatcactgtttttcctaatcaaatctaagtctttcataatgctctgcagtctgggtccaccctaattgtctaacttagaagtctcacaggtttcagttttttctgtttgtgtcctggatacatgtctttaccctttctaggaattcctccccgcttctctccacttacacagatcctcccaaatcttcactgcccagtcaaggcttctttctgtgccgaagccttcctagaccttccctgttcactcttctctgcactgctacaaccctcacagcctttactacacaatgccacacttcattctaattgctcttacaccatgtgacttcatggagtgtgttagctttcatttctctgataagagcatatttcttgtgagggaaagtatcttctgtgttctttttgtagcacatagtaggcacttgtatttgttaaataattgatgatgcatatggtgagctccttgcatcccttttctgtggatatgcacacttggaaactgagttggagctgagcatgcttgtcattgcagcatgattacatgtggagtctgattgcagaggggttttgcttttggtccacatttgattttcatgtaagtaaactaggttatgcttaaaaaacaataagcgatatgagaacatgtttttgacctcttctgcagtatrcgccatccgagaagctgccaccaacaacctcatgaaactagttcagaagtttggtacagagtgggcccaaaatactattgttcccaaagtgttagtaatggcaaatgatcctaattacttgcatagaatgaccactttattctgcattaatgtaagtataacataactgttattgctaagcttaatcattaaagcaaaattattcatgactatttctgaattatcagtatactgtcttctatttggaatatatgtcttgtattgattaattggaatagacaggagatgagagaaaatgtcaattttaaaattcatgttaaaatctacagtattggctgggcacagtggctcatgcctgtaatcccagcactttgggaggctgaggcgggcagatcacctgaggtcaggagtttgagactagcctggtcaacatggcaagaccttgtctctactaaaaatacaaaaattagccgggcatggtggtgcatgcctgtagtcccagctacttgggaggctgaggcaggagactcccttgaaccttgggcagggggcagagggtgcagaggttgcagtgagctgagatcgcgccactacactccagcttgggcgacaaggcaaaactccgcctgaaaaaaaaaaaaacaaagaacaaaactacagtattttaaaagttcaacttatttgtgaattctggtctaattctctgatcatttgaatgattcttgtgtcccccactcagctgctcaaactagaaatattttcctattggtcaattattttcttattaaatattaatttgtttcattagattttggaattttttaaagtattttaaatgtgccatcttacttatttttctaggcactgtctgaggcctgtggtcaggaaataactactaagcaaatgctgcccatcgtattaaaaatggcaggagaccaagtagcaaatgttcgcttcaatgtggccaaatctctacaaaagattggaccaattctagataccaagtaagattttagtgtttagtcttgttttaaaagtgtactttaaattttaccttatagtggggagtaattagctaaaattaagttcagggattttcactttacttaagatctgggtttgcttaaagaaaataatttagcaactatttttgaggatgtccactatgacttttatatttaagctctgtaaatgtgtagatccttgtctgaagctgattttgctgagaatttctttagacattattttgtgtatttgtcaagtttataaatgtctttatttttttactttaaattttaacaattaccattaaccatatacaccaaaaaggatttctatggcccattagactgtctttcacagataatacttttgaatgtcagtgctttacagggagaagtgaagccagtactacagaagttaggtcaagatgaagacatggatgtcaaatactttgcacaggaagctataagtggtatgtatttccttcttttgccttgcagcttatgccttggttaactgggatttatctctattatgtgagaggtgttaagtgggtaggatgataagtattatgggaaacagggagggtagtaagttcctggaatgctggtgtctctctgattagaaccctcttggcccaccattttctcataagtgagcaggctatttttcttagttacaygtaggactgggtaggaaatacgattctcactggtaagaatagtttttcgtttggaatttaaccagtttttaaagtttcacttctgattagcctggctgagtaaagacagtaaccacagtgagaagttgttagtttgatacgtttggatcattgttattgtgcttaatattcacatagatcgttcgtgaactttctgtaccactaacctgattttgtttggaattttccagttcttgcattggcataatgaggagcaggagggaaaaggcctttactagattcttgtcacaaatttmtagtcaatgtgttcttaactgggtggagaaagaatggaaaaccttcaagatctcatccaagcaaatggcaacaacttagaagaaatcatttagtgacttaattctttctaaagatgaaatgggattgttttttactcgtcttccttgttaaatcattatttaagccgttcttattgaccaattcctgacacttgattgtctcctaatgctttatccatcaccacctgggctcctgcatcctcactgtggaatcaggcaccagccacataatgttccagacaaagcctggaagggtgtggacccagacgtggagtggagtgattctcttgacgtttacatatatctctgtgtctctccatcattccaaagctaaatgtacatgtttagaataacttattttataaactcttcgggagacatgttgagatttgaccgtaatgaaarccacattttcctgaattatgatggtctgcattagtctcatgtgaaaggggaatgtggaagctcagggttaatgtagtggttgttttggtttttatttgctcaattttgtctgtactcatgtcattcagaaacctgaagtgtggctgcatcttgctgctaatgtgtgatgttgacgcctaactgaatttgaacagctcaccactgtgcctacatttaaaaatacttctctctcttttctaaaaagctttaactgtagtgcctcctaataagcagtatgtttgtttcattgtgagattgcagttctgtatttcgaatgagtctaagaaccacagggataatactgtgcagatttcctgttctttacctggctctgcttccagcagtattgacacctagtccttgctgcattgtacagtagcttttcaaactgcagttttattgctaagtttttagtatgggtgatactggagtcttatcatttgaagtstttgcttttctacttttacagtaaaacctcattaattctgaaatttaagataatgagttaagctgaagagtttactgaagcaaattaatagtgaggaagcctatttgaactacttaaacagtattaaagccctttttaaaaagcacctatttgggatcatttgaggtcaagaattcgagatcagcctgaccaacatggtgaaaccccatctctactaaaaatacaaaaaagttagctgggcgtggtggcacacacctgtagtcccagctactcaggaggctgaggcaggagaattgcttgaacctgggaggtagaggttgcactgagccgagatcgcgccactgcactctagcctgggccatagagcgagagtccatctcaaaaaaaaacaactatttttcacataatcaaactcaccttgtctcatgacttttggttaagggggttttcccatagtttatttttctctcagtgcatcttgctatgaggtttgcttgttacccttttggtttttgaattgttgattttgttcacaacctcttttaaatctaacaagtcctgttctgtttagtgaaggcccaaagactcctctaagactttgtatatttgttacataaaaccaagttttactaaatactttaaaatttgtcctacattcgaaaaatagaaattgtaaatcagaggttatctgtctgcattttaaactgccaaattaccttatagtaagtttctattttatgactttgggccaagaattaagtattttcctaagcacaaatctttttctatattctcattttaatatcttatgctattattctgtaaacattttaattttagtttcatgagtctttattttttgttacctgcaagttatgttcttcttcattgaatttcatatttgagagacatttgtcttcatgaagcagatttgcactggaaccattgctttactctggttggaaatgccattgttttggggacagacttttaaaatgcccttgtgtctcccagtgaggagccctaagcattgacttctctaccctaaaactgtttgagagagggagagtgggccctggctttctcaagcatgggtcgggggttcagcggggcctctgtcttttgtggtgacccctcaggggtttcattgtttccttctgacttaagcaatagagagagaatttgttttggtactcttcagaggaattgtgctttggctcataacttggccatgttctccatgaattagttctcctatttttttttttaactaccttaaacttaagggaaaagttctcctatcttgatttcactggaatataggctttaggagctctgtaaggctggtattttkgtctgttttatcttctactgtatcgccagtgcctggaacagtgtctggtgcacataataggtgctcaataaaaatgtgttcaatggatgaatttctaaaatatcctccaatgtgtgcatggaacaaataatcaaaagaaccagactgtgtcttattctcccactgacagaaagattttcctgctttcaggaaacaagctttatgtggcccttttctggtcccctggcttagactacagttctgtgtggatttgtctgattgcttcagacatgtaatgttgtttttcatccttggcagcttacatcagttgtttgtttgattagaaaaatgaagcagacacacacacacacacacacacacacacacacacacmcacacacaaayatataacctatgccaataaaaatgtctcagcaacagtggaattcaccttggtgtttctctctgtaatttgtgtggggtttacccctcacaggtttaagagaccaggtcttgtttctctctctgtgctaccaagaagatgtgaacctgaggatgcatcttgtttcataagaaggaaggcaggtgaatatgtggtttctaacgaggtcttgttgaaataacgggctgccctcagctcacagaaataccacagctcagccactgtgatgcagagccccaggggtctttgccagacaacttgtcctgactcaacagagacggcagcctgacctttgagctggcttgtccaggcattcaggttgcttgcgtagacttccagggaagcaagcctgtccttcctgacccggcggttaacctggtgcacttttgttcytttgttaactgttgtgttgtcactaaactgaaaggctggggcttgcccttagacgtcacattggctctgtccctgtggcgatggcagggcagggtggccaaacaggtcaggtgcttgttctgtcctcttgccttttacttaaattcctctgacttttaaaaatggtgacactcttatcgtaaagcttcttatttttctccactgcttggatatgaaactgtagagggagaggccctgttgcccagtgttctcctggtttagcagctgaggtgactgcagtctgatgtgatgtaactgtttccctttgattctccagtattcctgtttccatccagttccttactctcctctttcctcttccctcgcatgtctccctccagtcctctgtacctagaatagtctcactgtcccccgtttgcctccacgagcctgctgtttccaggaaattacataacgttcagttgggatggaaatcttccggaggacgaatagagtttaattactcattgcgtcggaaagccaagccatttctgtctccagagttgttctcttaaactgatatgagttctgaaaggagccaggtctttcctgtggttggggctctggagaccatcagtgaccaggatgtggggaacagccaggtggacaccaaaaggcccgatggggtggcgctttccagggccccgagggaaaggcacctcagcacgaccctgggctgccccagctttctctgcccagtgccccatatacttgtaggctgctgctggacacccaactctgctggcacaactgagggcatcctggctgggaagcacaggtgggcttgggagggatgtgccctggtcagggacagttacagcgccactgtctgtgtctctagtggtggcacaaaggctgaggaagctagaatttcctgtgaaggacagtggagaacccagtgtccctcgggctgacaagaaccacttcccaagacccacagtgcctggagaggacatggggaaggtaagtgcccggaagcctggggtcaagtcctgccctcagggctgcgggcagccagggtggcatggtgtgcagggagctgccacagggtaggcggagaagcagcacctctcactttgtccccaggggaagagtccaattttaagggccgggagtagatggttaaagcctgttgctggcttacttcattctgggaatgctttctgagaggtgggtcgccggccagagctgtcactcttgtagcttgaggcccatctcctatcacctcccagtccaacagcgaggcccatacagaggacaccagtggggtttggtgaagaattgcttgtaaaaaggggctgttcccactttcctcacataatatagaagtgacttgccataattcctctcagttatttccattcaagataaaaatagttgcaagtttctctgtaacagctcagatgttctacaagccccattggatgccactctgtgtggaaatggtgtgaaaagccccagttcagcagtcagtgggtgccagccactgccccagggccattcattaggagggcgatttgtggcttacagatacattcagaaaaggagagcagcagggcttggctgcctcgtgcggatgccagactgcgtttagttcatggggaaaaatctgacattctcacacccattctagtaggttcgcttagtgaaaattcaatgaagtaacatcaaaaaggctgccttttaagtcacatggcttttcattttatgtgaaccgaaaccatgaaaacgttttttgccttttgttgaggtccagaatcgcagtcactcatcttagaacattcttgccttcctgaggggctgcacacttgtccgtgggcagctccagccgttcctgcagtggcygcacagtgagaggaagggctgggtgaccactgtccagttggattccaggggtggccagcccttggagtccatgtcgtcttcacagaactgggcctcagggaggagagcttggctgaaggagtgggagtgacagttacacattttttaggcctaaaccacagacttctttgggaagaaaggggttacgtcttcctacaaattcagagccagctgctcatgccatgaatgcgtggtatgayccgatctgagtgtggatcattgaggcggccctcccatggctgacctgctcagctctgacagggcccgggctgcctctgctagccgaggagttactgagaataagttgccgttactcgagccttggtcactgcagcaccttgtcaggcacttcaaatctcatgtcatcctcacccaccctaggtggtaggtgctatcattgttttttggtccctcatgaatctcctccaacccctggcatgtctatttgggaatcttttttccaggaaaggaggcccagtggtgctaggcctctgaggcttcagttcatttaactcagaaaaatcccccgccccatgactcagggagccttccatgcatttgtttcacttaaggaaaatgacccgagggtgagatggaaagggaattggctgttgccaggcagagccctgtgtgtcaggggccagcagccaagtgagtgatccaggaagtcatccaattgcaaccagaaattgttcttaacccctcactgtctagggtgcgtagtggacttgccaatctgtccgaatggggtgagcgtgagcgcgctgctgttgagagccctgggaactgtcagttctcagccagcctcagggccctcagggagccattggacatccctrgggctgggcccgccacttgaagagaaaagggaaagggcgagagccagtctcccttggtgaagagcgcctccttggcacccttgaagtctgtggaggtgcctctgtgttggatgtcacatgtgtccacccaggcaggatctgccagggagcagcgagggtcacctcccacaccttgctgccgcgggtccggcagcggctcactcctggacgggacacagggtgcccccgctgaagctgctgacgggccttgtcaggcaggggttaacaggggatttgtttattgaatcaccaagtagctgtcacatgattttaatcaaaacaccatttccctgacaacagtgatgtcagtcttgttattgcaggaaggagcagctgtgagggacattcagtctccatgccgagcccaggtttggagactaaaatcaagtgaagcatccataaataatggctacagacactgcctgactgcgcccaccctcctcctcttccttttctctgcacacagtctgtcctgtacacacactgacccgagaccagcccctgcgccacgtcccagctaagaccatcttctgccttccatgccccttctactcttgtttctggttttttcctgcctgccttattttccccaaactcagagagtcccttgggccctgagggtctctgacttgtgcctttcgatgcgggtctcttctctggatttaatcagcacctgctggtgaaccaggctgttctgggcctgaggctggagccattctgcagctcaggaacctcacttgtcctagagccagcctctagcatctagctgcatgtcctgttcctcccacagagttaggctggcagggccttcgcgctgccctggggggtctcaagggcagctctgaggagctctgctgggagtgtgtgaaggggaggagctccttaagggccaacctcttggccagcggattttgttctcttgaacccagaaagactacaggagatgtgagtccagtcaaactgaggactgatgacaaagaccaaagcccagggatgttcagtcccatccccagtggcttccagctaaggcaattggaccttgaagtccatggggaagtcagacgtaggctggtgacagggcacacgggagcaggtccttaggctgacctcctgtcagtgccctctccactgtggggcctaggggccgagctgtccgcrcaaaaagactcccccaggccttccaagtcttttccacactggagcttgacctaacagttggagataaaaaagtcctcctacctgtgacatagattctcagggatgttcttatgtttgtggtacccatgtctgatgcctagaactcatttccgaaaattcagaaatcctggggcagagttcccagttcttagcctgaagcagatgctcagaacagcacaaccacccttaagtcagtgaagacagagctcacaggcaagaagcagccattttctgtacctagtgttggggcaggcaagagttaaagtaagataggcagagtgggactctgtgacagccctccaggggagtgggggtcttccaggagtgccaggccaggctgcatttgcccctcgcagtaaaccctggggtgaaaccagccagcctgtgctccaagttaccactggagacaccagcctttacaatgatttgcctgggttagtggcagggctgagagggcgccaggggccgaggcctctgtcagaggttctttgctgcctcccagaatgtccctgcctggagggtggccaggtggtggctcccgggctgggtgggagccgggccttgctctcccaggcttgctctgtgcctagccctccttgcctggccctctcatccctggttcccttccactgcctgcctgcccttcagccctcactttgctggcacaggggcactgctaagcatttgggctctgtagcgactggaaggcagttctggcggatcccagacagaagagacaggcaaggctgtgcgctccgggagctatgtgtggcgtgcttggaggaaagggcttggtgggcttttcctccattccattgtgtcccacccccaactatgtgggtggccctggggtgacaatgaacagtctcctcagggtctgatttgtcagtcagccccactcggggcatttcacttttggggagtgaggagctggagccagaactgtcccagccgacctgaggagagagtgactcagttctccctttgagaagctcaatccctaatgcctcattttcctctgggcccacattttctgagcttttctgctyatccagcttttgggggctcggctccaggggaagtccgcttcccatgctgtggctccctcctgtctccaccctcccagacactgtgctggctcgggggctcagcccagctcatgctttccctgggcttggaatctctctttgccaatttcagagcagctctgagtcagtctgccctaggaaatccccccagaaacacggacaaagggaggcagcagcaggaaggcttgctggaaagaacagtggccgaggcgcctggcaagctctctgccctgcctgaccttgggtttggcctgagtgatttgtgggcacagcttcatacctggggggaggcaggtgtgccagtggcccctgtgtctgagggagggcccagccccttcgcctcagtcaggacccacatctgcctcctaagggacgttgtccaggatgattcctgtgcgataatccatcgctcaagggctgctcagcttttgaagtcactggtggggctgaaatgagaagggcagagcagccatgttctgtgcaggtgacatttcctttgtagccacatagcacccaggatttagtgcacaaagcccagaacttcctcccatggtgcccacgggctgctggcaagcaggaggctccctgtcacctggatccacccagggagggatgagaacccatcagcagggagggtccctctgagctttgtttgtttgtttatttgttttttgagatgaagtcttgctgtgtcgctcaggctggagtgcagtggtgcgatctcagctcactgcaacctctgcctaccaggttcaagtgattctcctgcctcagtctccagagtagctaggattacaggcgcccgccaccacacctggctaatttttgtatttttagtggagatggggtttcaccatgttggccaggctggtcttgaactcctgacctcagatgatccacctgcctctgcctcccaaggtgttgggattacaggtgtcagccacagcacctggccaagaacttttgagagagcagaggctgagtcaggggttcctaactttggtccctggtggggaggggggcctcgggggcccaggaaccaactcctgtcctgaaattctgtgtccgaagttctgggtctgtgtacatgctctttgggaatagtccatagcttgcatgtcaaggggatctctgagtcctcgatttaagatctagtggggcagaaagcagctgctcgccaggaacagaaccttgggccctgttcccacctgtcctgcgtcttgatggagaacttgggaagtgcaggcactgctgtctggttccatccactgggcagaggccctgggtttggggtgcaggcctccctgctgctctccttccccaccctgctggagccttcgactcacaaaggctgcagaactgaagagtgtcctggggagtgcggggttggggcctagctggccactggtctgttattttgcctgcgtcctggggcattggagttgtttttggcaacacagaataagaatgatggagaaatctggtgggaaagggaaaacattgttactgaaatttagtgctttccttaaaaaagaaatgaaactcagcaatactgaaattttgggtagccaaggggtaaccaccagtttaaggcagaactgagctattgtcagcagagtcaggcagcagtggacgttggtggagagggctccgctccttccagcctctgccagtgtgggccctgccgactgcaccttcccaccgctacccagagaccagcggctcaccccgcagggagggaactgtcaatgttctatagcatgggctyaattggaatggtttgagtgaaaccaaatttcagtcgagatcctgctgccagcaagctggatataacagtggcctttcactcagggcctggcactgaaacaggtccaggatgcaggagagcagcttggcacatggtgcctccagcaccctgagggcgtggagctgggcctcaaaagggtgccccgcccatgtgagggaatgcactgtgtgagcgcacgtgcagtgtcgaggcctttggcagaccccagagaagatgtgacatcgtgactaagtagcagtgtcttttgcctggcagctcgcagcacctcccctcccatttccagcccctgccctgtagctgcctgtcctcggggacccctgcatctgcctcccctcctcctaccgcggcatgaggcccttgcccaggctacctgggctgatgcgctttgccctgggactctgagaatcaaggagcagtaattaagcagtgcccagcagggccctgtccttgtgcaggctgcggttagcagtgcttccgtcagcgatctgcagcggctaacgtgtactcgggcgattcagagcaaggtattatttaccctgctgacgtcaatgagaacatattatccactgtccttttctgcagcctgaaatgagcaccagaactcagagaacacagccaccttccatactctaaaaattccacccaaggcccgatgaggcaaaaaccctatcgcattaacctgacattcacatcacccgggctcttagaaaagaagttgtttttattttaattcaagagggttggaaacataaaaacagtacattttccttgcagaaaattaccccatttaaattactatttggtacagagattatttattacactgcattttaggcaattttctaacattaagtgacaagttatacttttgattttttttttcacatkggagctattatgatttgcactcataataccaaagctactgaactcaccaatttttttcttagtaattaaaaaaaagcacacagaaaatataactacarttagattaactttatcaaaagtaactctttcagaccaaacatccagcaaaaccacccacctcccttcagatataagcaaataatcttgccctttctacaaagtgcagatatctctgtatcccttttatttctcaaactgcagtccccgaagtgaagcaaacctttctctccacttctttccccttcagagattttggtgaaggcaggtttctcttaccacccatggtggaaaggtctcaccacttgaatttccttgactgagcaaatcttctgcagacagacaccacagagccagcagcagcccattatctgcactggggaatgtgacattattccatctggggtcatatgtttccaggatgttgttttgtacttctatttttaaagctcccctctacccacccactttgcctctgaaaagacagagtattaagtcaaagtctgttattacttttttaatcctaaaagtaataagcacttctagttgatggggcttgactgtaaggaaatgttacgcccctcgttgagacaaaggctgagttcatgaccgttcctggggtggaatctgctggcctgcagtggtggcctgatgccgtgcgatgcggccccttggcaattgaggargggggtgttctgtaggaaactgctgtattgtaacttggaaaaactagacatctttgaggtgagcctaaacttctgcagttaactggacgctgaaaggcaggcrggtctgcggggtttttgtctccctcagcctggttcagtgcacggccacctggacagctgcactgtcacctgaaggcggcctcttccccaaagccaggcggctgttgagtggagaataaggttgtgggaacaatatcacattcaccctgtgcttgaccaaaatgggggctttgtttatacagctgtttgcttatgaaaagagtcagatgctactgaggaaagagaagggaaagagagggcttcttccagcactagaagccagagaaccaaaaccagaagccagtcaacccaagcgcgtgtcccagctccttctatcaccagctgtgatctcagagaagtcacaaacttcccaaagctttggtttcttcagctgtgaaaaataaggacagtatctccccagctaatttcatagaattgttgtgagggttagaagagaaagtgcttggtaaaactaatgtacaaatataagctattgctcccttgtgggtgggcgagcagagtatctgggcagaacccatcacagctctccctgggtgggtctgcgagcactgctgccgcctggttctctatctgtgccccagtgtgtgcctgagtctgctgataggttgaaacctgcctggagaagatgtggacacaaggtgggggtgcacgtaggatggctgtcttctagaatcagctaggctaccttaattaggacaaaaatggtaaaataagaatgtgagaggctactggaaggtgagaggctccactgctttcgttcacctgccaccaagggccagacaagggctctgacattacaggtgcttcagaccacactgtagaacctgtcagaagggagatgatagaaactttaagaaaatctctttgtccagtttagaaacagaggcagatgatactgctcttgtctttttttttttttttgaggtggagtcttgctctgtcgcccaggctggagtgcagtggcacgatcttggctcactgcaagctccgcctcccgggttcacgccattctcctgcctcagcctcccgagtagctggaactacaggcgcccaccaccacgcccggctaattttttgtatttttagtagagacggcgtttcactgtgttaggatggtctcaatctcctgacctcgtgatccgcctgccttggcctcccaaagtgttgggattacaggcgtgagccaccgcgcccggctgatactgctcttgtctttcatacattgctctgaagataagttctataaaaaaattccaggtcgggtgtggtggctcacrcctgtaatcccagtactttgggaggccaaggtgggtgggtcacctgaggtcaggagttcaagatcagcctggacaacatggtgaaaccccatctctactaaaaatatacaaactagctggatgcggtagcacacacctgtagtcccagctacttgggaggctgaggcaggagaatggcttgaacccaggaggtggaggttgcagtgagctgaaatcacgccactgcattccagcctgggtgacagagcgagactctgtctcaaaaaaaaaaaaattaaataaattccagaagcaacaaaatgatcaaagatccctgcctgtacaatgactccaacttacgagcttccctgttctccaattttcacctttcatgtttaggcacaaagagaccgagtggctcgggtggcttcccaggaggcagttagaggcagcccagtttaggagtttgagtgtagcaggtcagccctggcaccggtgtcagccactgttcacagggactgagactgtgaaatgacacactgcatattgtctctataggaggtcgaatgggaaaaagttacctggagtatgaattttctttaaaccaatagggagcttaaatgtgactgttgatacaggttttaaaatgtaatacaaacatatttacgaacctggggcttgactagaggctggaggaccccaaaaaggagcgccactcactcactgtgtccttgcatcctcaactgcccgcatgtctccagaggctgcttagtgcccacacgcctgggaccaactgtgactccaggctgctgcttgtcaccttgccttagtttctggctgatcacctaatcactctggagctgagaatatccttctccccacatctaacccgtgggcagaattctgtgagcgtttccctgcctttaggactgatgacactcggtgtgtgggtggaggtgggggagtcgtcagtcttatgatgagtcycttctgctggagactttggtccacgagagagggtagggggcaggggagaggccgatactcctacagggggggtccccccttgctccccatcaaaatgcagagcaccccattactccagcaccagagttgggaagggacacaagaggcaagggctggcttcagtcttgggctcctgtctgtcccaaccactgactccagcatacggtttaaacacttgggagttcttgatatctgaggaagaaagggccactgactttttctttcctaggaggcaaaagtggatggaagagagaaggggtttgctcagatgggcatgaacagcccctgagccccatccccactcccctggtgggccctgatgctctcccacgcagggattctcaaggtggatggtgtagagaaccatcagcctccttttcccacggtgacagaaggcagtgcaggcagaggtggcgagggggcagctggggacggtcagtgtcacygggaatgtgaaagtgggccccctcttcctgtcgggctaacatgctgtttgccttacagggaccagtgtatcagttgcgtggagatactagagacacacttgcccagctgggaattgcagagctagtgcatttctcccaaagcacagactaataccccagatttaaaaaaagaacataaaaaataaagtaccacacatattgcactttttgccgaacgaaatttttacctcacgttcatctcaccaaagtctcttcagaggagcctggtttacagggtgatgaagctgatgatgatacagtagtgtacacactgctaacgtgaatcagactggaaagcaagtcagtacttcagagtagccccgcagaaaaagagcgatactaagccttcttagtgtttygtttgttagtagtgatgaagagaaaactgcttggaagcttccatgggtcactagttagggacagagcagcacaggtgatcagacagggctgagcaaacacctgactgaccaacagaaccagtctcctcagcagcttacattgcagtcaatacagagggttatggaatttattgatttctgcttgaaataaacaagataagcaaataggagcttacaacacaggtcccagcaggaggggtcacgctctgcatcaggccggtgtccacgccgctgccgtgtgtgacggatcctgataggcctggctgctgtagggcacctctcgatttctctctgggtccttaaccttccagtagcctctctgcagtccctcatcggctggcctaaccgtcctgccatagctcccaggtctcctgggctaagcagctcatggcattgttggggggcaggagtttatgtcgatctgtaactacaccattcctgcagttctgaaatgagtggcccccattttcaatctgcaggcattttaatatcgcaaatattgtagcacttctgtagtatattttgggaaaacgtcttccttcagtctaaacaaatcaagccccattttataactggctattttgtaaagactcaaaacagattagagatcttaatgaaatgatctcttaaatgaaatgatgttctttatttcacgaaatcatcaatcttaagcacgagcaggaataaacaactcccagaagaagcttaattcattcttcctggattttcactgkgtgttattaaatcacaaaaatgacagtccccacactgccctttcccactgacaccaagtccaaccgtgagcacagtgcctctgcgaagcatcctggcacccatggtgagcgctggcgaccaggcagtctctggccagcaacagggactgctcaagttaccgacgttggtaggagctgggctcgcatggccagaatggaaccccctagactttccacacgtcacctgcctgaacgctaactacaaagaggaaaggcaacttaaaggtgttttctagatgcagcatcagttagtccctctctttgtgctttaaggaagatgctttgtgcttaacacattcatctgctgatgggacaagccattctaaagggcagaaatgatcatctttagaattaacactgactttgtaacacctggatgttaactgtccaaatggcaaattattcatcatttctagggatacagttagctagctgtagcatctaatttttacttactttgatgactgaattgtaagtgttggttaagttttattagtaatataatgtttggcagatgatctgcttaaatggttaacacatctgtggttctttctttgaatattgctgtaatacttgaacatttcattacaagtcaaaactttaacgaaattaagaatgctgattcccacatggtggaaaacaaactctgaagtgactttggatttagcattgacataaatggaaactgttggtttctacagaaaagaaagaattaaagcatgatctgggggaaaggcaccgcactaccacttcacatgggacagaaaagttcatttatcatgtccttaaaatctctaagccctatatgaaactgtccaaatatacaaagctcaataaactactagcaacatatagtgtaaggtcaaagtagttattacatcggaaaagagacaacaggtaccctggagaccgactgcccgcaagccagcagtgtccacgagaaactgcaggaagagcctgtcttccctggcccagggctggtgctcttgatgcgttcttgagtttcttgccccctgcctccacggtggcgggtctcctgtcagttccacgtgtgacacctctggagtcctgagtatattctgacactcggcaacccagggcaccttctgaaggggtgtgtcacctgcttccgaatggagatgaaggyggtttctggggtcagtaccagctgttatttagtggcccctgaaacacagctcatgccccactgctttgtgatggccttgggggacaacttgcatcagcagctaagaacttaggattcaatgacaaagcacagctttcctttatttcctgtgcatctgatttcctgatgtcttcttgatttgccttgtagcaatatgtggttgctcagcttcagtgaaaaatatattgccttttcccccatatatatgcaatagcacacaccctttctgctttcaccaaggttgcccttgataataaacggatgtaatcctgcataagacctgggtctgaatgtcttcttaggaacacatttgtcagtgctgccctcgagagcttgctccactcgaccgaagggcaggagcctcagcctacaactatgttccagcacttgccacagaaaactttgtggtggggcagaaccaggaggaagcaacatccaccccagccagaccctctgattccagttgggtggctcgatttctccccgttagggagagggcaagaaaataagctttaaatttaaaaggctggaataaaaataggaacatacactcttccttcacctgacccacctcaattcctgtgctgagactaattcaccaggacatacccgttgtgttgtggatccacagcgtctagcatttcacaatcaaagagtccaggtagctcagagagggctagtgggtcgtagctggagggggcctcttgcagtcctgggcttctgggacagtctggccccgttaggtcgctctgctgggctccatccacaggatactgacagggagtgggatagtctggcgcaggggaagcagcgcttggcagctcacaagtctgataggagaactgtaagggggctggggcagctcctggctgtcgtggtggtggagggggtggtggcggtggcggctgctgctgctgtagctgygtgggcagaggaggagcagcccggggaccggaagtggagggcaggggctgaagctgcatctcttggtactggctgaggaaagggctgtattgcatctgctcggaggaaggctccaggacggggctcaggggctgggtcaggctgaacggtggggcctgctgagaaggcggtggagtctcctggcggggaaggggcagctgctgacttggctgtgggtaggagctctctgctatctgcatctgattaaaataggcctgcagttgagactgcttctgaagaaagagtcgcttctgctggagcctaaattggtaatatcaaaggaaagaattttaaatcttctcaagtgatggcaattttaatgtaaatgcaataccagtcactagcttcagtcttctacttaagtctctctcatgtcagcaaaaacaagtgggaatgggaaccaattgtgttgggtctcttaaacctaatctcatgttttgccccccagttctgatgatccttcagtactaacgtgagcaggaatgcattttctctgactccgagttttttcctttatacaatgagaggatgatttcccttctggagaggctagaaggggagataatcacaccttggcctctgcaggtgtctgcagttgatggattgattagggtaggtctaccttggccaagctgcttctactagcgaggctgtgggcacacatgatagtaagggaggacggaaggctcctgtgccgcctaccccacctccatactttgggccactgactgtgaaagcttggagctagtcataccccaaagaggaaacgctagaagaaaaggaaaacaaagtacactgtggggctgccagtgcctgacaggaccatcctccatggatactgagatatcctcttagtaatcgtgctcagagggcctgtgacacacgcagaaaacctattttcctagtagtggcgaatgtgagaggaaaaggacaacacattcagtgttctcaaggcttccagaaaaggaagcaacttctttggccaaagtccccttctcacctatgttcctgcagctgctgctcaaggctccgyggtggttctttgcaataaagctgacaggtgttctgggcctttgacagaaggctgggcttctggaagagcagaaaaacaacatgagcgtgacaatgtgctgtcacctaggatgcagtcatcagatgtgcttctgcctgcaggatgaatctaactgcattctacagaatccacacggggtgaagggactgacatttactccctgagaccctgaaagagcatcgggcccgcaggcctgggccatctctgacctcacctacttcctttttccactccatttccaaaagtccactaggactgtgaggctcatggacattaaaaagcaatgagaaaggtggagttagatcttgagagcaaaggccccagcacccgctgaatgaatgattcatcctttacgggatctatgctttatcgctttttaagatttttatgcaccaacatagaaagcccatgtagaaattctgcagacttaaggttttcattttatttgttactcattaagaggaatacaattagaaagaaagaagccaggtctcccgttcccacccctcagtggcatatcctttcgtggggcttgaggacaaagcctttcccaccaccaacacacagcacaaagctagatctgaacacgtttctagaaactccaagtacagagtcaaagctacttgcctataaggaatcaagcagctaccctaaataaatgccaggcaaaacacgtttctgctttgcagaagaacagattctggatgagcagagtgaggtggactcgcaaggagaaggacccacctggagtctgtgctgcaggtactgggtctccaggctctgccgtggggacagctggggatgcacgctggcagggagagtggagacgctttcctgctgctgagaaacttcttcctgaggagcaagggggtggaaacaattttcaattccccatggggaaaaacgtctcagttcttagctgaagcacctttgcaatgtccaataggaataccaactccactgagacttattaatactcaaagcttttacagagccagtaggctgagggctcattactctgcagaacatttatgcatgtattatctctagttaacaattacctagtcagtactagagcaaagactcttggtgtcaccaggaggctatggccttcatgtgggcctcgaactataatcctcttggatgcactgaaaataggctcaaaataaaatcaggtaagtagcagtatttattgtatttttagtatgaataatccacttgtagtatttactaaagtgataccacatcaaaagtagtggtgagaagcttctcatttgggtgtagttcatttgtgtatttttcatttgggtgtgtgtgtggcaggagaaggggagttcaagggcgactgtaagaggtcactcatctgtactctgccctgtgagccaaaaacagcttgagagtgtccaggcctccatctggtattgatcacttggaagcagcgtggatgggttgaacccgtcagtggcaggtggcagcaacaaggcaaagaagctgtgggttttcccaaacagcctgtttgctccaggactggaggaaatcctctaagtgaaaatgaccatcttcaggacaaactcacacctcatcctcacagagccattgagggaagggcccaaggtacccacctgagggcagctgctagcaaggtcctggagctgaggagccgccggcgccaggttagggtctgcctccggtcctatttgttcatacaacaactgcactttgttcaactctagaattcctttggttctagccagattctgaagatgttgtctaaatgctacaattcctgaaagaaagcaccaagaccaaacagtttaactaaaatacaaggcctttcagtgaccacaggtgaccacaccaacatggcaagaaactgctctcctacgacgcgagtttcaaaaagcagaggaggaagtgctcaccctgggtgagggaggtatctgatgctctgcggccctctctgaagctcactggagacctgttgtggacctctcgtttctgggagctcagagcctgcatggctgggttggtaggtctcaggcttatgaagggagatgtcatgcggggtgaaggctgattggctaacatgatgtccttaagggaagggttgtcttccagaaagttcaggtccctctgaacagaccccatatcatactcagagtccacactgtcaagggaggggctgtcattcatggagaaaattttccctttaagagaaaacagaacagataaaaccaacagcaatagcatctccttggaacatagggtacaaagcataaccagcttgagttttgacagctaccatgtccttaatttccaatcaaaacatcttttcagagcccttttactggccaatttagtcatcttcaagtttagtggggaaaacactccagaagtggcatctgtaagatctcagccagtccaaaagagccagagtccctgatcaatcacgtggcacccagatgaatcctggggactatgggagccaactcagagacatttcaattcacctttgatagctgctgccaggctgtgtctgctatacctgctgaatctaatccataaaggaataagctatcgactcaattttaggtgttggctggcatcgtgaccacttgttggcaattggagtatgacatgatgccatgaagactcaagctagtgtcgctcctctaccgtacctgccccaggcatcacgaccagttgattggtcacttctgacagagtgtgccgtctctgcccgctgcgtgtggactgaaatgcctcaaaggcatgagcggggtcttcctcggcctctccttctgtctccagcccttcgtcaatggaggtctccatcatgttgctgggcagtgactggcatcccttccgcaccaggacaggaggcacagggtcaagcagacagccattgacctaaacgccaggggagagaggaaactcagtttctgcactgctgagacagaaaaatccacaaaggaaaacatgtcaagacttgtggcgaactagaaattaagtaaaatatttaaacatgcacatatttattatgcatgacaacacatagattagaagtgaaggcaagtcaactgcaggactcagaactctgagacagaagcccatgatgacccaaactggcactgctgcccaggtttctctgagtcatcattattacaataaacaacttttttagtggtttccagaagaacaggggtatattagtttgaggactaccagttattatttttttttaaataagggaaatgaagagggggaagatgagttgtttttttttttttaactacatggctcattgctaaaaaaa

SEQ ID NO: 95877 - DNA, 44725 bp, Homo sapiens
caaatgtgctaagaacatacactggggaagagacagttttttcaataaatggtgctaggaaaactggatatccatatgcagaagaatgaaactagacctctatctataatcatatacaaatatcaaatctaaatggattaaagacttaaatctaagacctcgaactatgaaaatactacaagagaacaatgaggaaaatctccaacacattggtctgggcaaagatttcttgagctataccccacaagcacagacaaccaaagcaaaagtggacaaattagatcacatcaagttaaaacacttttgcataataaataaaacaatcaacaaagtgaagacacagcccacagaatgggagaaaatatttgcaaactacccatctgacacaagattagtaaccagaatatataaggagctcgaacatttctgtagaaaaatatttaataatctgatcaaaaaatgggcaaaacactcaaatagatatttctcaaaagaagatgtatgaatggcaaataggcatataaaaatgtgcttaacattgatcatcagagaaatgcaaattaaaactacaatgagatatcatctcacttcagtgaaaatggcttatatccaaatgacaggcaataacaaataaagagaatgtggagaaaagggagccctcatacactgttggtgggaaggtaaattactacaaccactatgagagaacagtttagaggtttcttggaaactaaaaatagagctaccatatgatccagcaatcccattgctgggtgtataccctaaagaaagggaatcagtgtgtcaaagagataactgcattcctatgtttgtcacagtactgctcacaatagccgagatttggaatcaacctaagtgtccatcaacagacgaatggataaagaaaatgtggcatatatacacaaagaagttctattcagccataaaaaaagaatgagatccagtcatttgcaacaacttagatgcaactggagatcactatgttaagtgaaataagccagacacagaaagatgaacattgcttgttttcacttatttgtgggttctaaaaatcaaagaaatttaactcatttcataccccccattctcccactacccttcccatcctctggtaactctactgtctattagagaagttactctctcatagttacaaaaggctgggaagggtagtgggagggtgggggtatctggggtgcttaatgaatgcaaaaaaatagttaaaataaaagacctactatttgatagaaaaccagagtgattatagtcattaataattgaattgtaccttttaaaataactaaaagagcataattatattgtaactcaaaggataaatgcttgaggggatggatattctattttttgtgatgtgatttttacacattacatgcctgtatcaacacatctcatatactccataaataagtacactatgtacccacagaaattaaaaattaaagaaaaaaattaaatgaattcaaaaacaaagagagtctctctactgtaaaccttacaaaaaataatgtgaaatccttactcctatattagaacagaatagaaaacccatagataaagccacatacctatggccaacagatctttggcaaagttaacaaagatatacactgtggaaaggacaccctattcaataaatggtgctgggaaaattagctcgccataaacagaagaatgaaattgggcccctaattcttactacatatcaaaattaacttaagatggattaaagacaaatatgagacctaaaaccataaaaatcatagaagaaaacctaggaaaaattctgacattggcctaggcaaataattcataactaagacctctaaaacaaatgcaacaatatcctgtgacaattggaactttgcccagtttttaatggggttatttgttttgtcttattgacttgtttgagttccttataaattctggatattagctcttttttgaatgcacagtttgcaaatattttactctattttgtaggttgtctgtttactctgttaattatttctttgctgtgcagaagctttttagtttaattaagtcccatttgtcttaaaatgttttagcaaaaataagaatctagatgtaaatcttacacttttcacaaaagttaactccaaattgtttatagaactaaatgtgaaacacaaaactataaaactctgagaagataacataggagaaaatatagaagaccttggcaatggtttttcaaatacaacaacaagtgcacaatccatgaaagaacaaatcaataatccgaactttgttaaaacaaaaaaaaagttttactctgtaaaagacactatcaagggagggagaagtccagctaaaagaggaataatagttccaaaagatacaagaatatatctttataagaataaaacactgtcatccaaaatacccaaagaactcttaaagctcagcaacaaaaaagtggacaccctcaatagaaacatgggcaaaagatttgaacagacaccccacccatgaagataaacagatgtcaaataagcatgaaaactgttcaacattacacataattaggggcctgcaaacgaagacaacaatgacacatacctttataataatgaacatctaaggcactgataaaaccaaatgttggcaaggatttgaagcaatgggaactattagttattgctgatatgaatgcaaaatgtcacagacactctggaagagagtttggtggcttttacaaaactaaaatatgcttaccatatgatccagcagttgtgctccttgatatttgccaaatgagttgaaaacatatgtccacacaaaacttgcacaaggacatttatagcatctttattcattattgccaaaattggaagcaaccaagatatccttcactagatgaatagataaactgtggtacatcaatgcaagggaatattattatattactatttggtggtaagaagaaatgagctttcaagccatgagacgacatggagaaaccttctgcatattaataagtgatggaaacctgcctgaaaaggctacatactgtgtgattccaactatataacaatctcttatagtaaaggcaaaaccatggcaacactaaagtgaactgtggttcacttgttaccaaggacttgcatggaagggagagaatacgcagagcatggggggtttttaggacagcaaatctattctgtatgatgctacgatggtggatatatggcattatacatcagtcaaatttatagaatgtacaacacaaacagtaaaccctatgtgaacttcgaactttggttgatgattatgtcttattgttggctcactgactgtaactaatgaaccccactgatgggggttgttgattgtgggaaagactatttgtaggtgtggtgaaggggtttgtgggaactgttgctcggagcctaaaattgctataaaaataaattctattaattaaaaaaaaccccgctctaattcacaaccctatccaagctgaggtgggtgtcaatctgtgactgtagagggcttaattaatgctaatacactcttgatcatttggacttaggtgggaattctataggatagggtatttcactgaaccaccaagcaggaaaactgggattctaatacaaaatcttttactggtgcattgataatgctctaactcactgagtcaccaattgctcattcctgaaaaacaaagcaaaattaaattagtagatctcagagatcccgtctgtctttaaattatctatgttccttttattctataaaaagaaaggtcaaggcaggagcctcagctcaggagaagaaacaaggagcagagcaaggacaactgtttctcaaggaataaaattattgctctaaagagagaaagtgaacttattttatccaaataaactagcttatacctacgtgagtgaggcagcaaattactacttccctttgccctggataaagggttcaccaggacctggactcactcaccttttaaaggttataaaaccaaacacgtctgacccacattttactcaactggtgctagaattattaactaaattaatgtttattttgaaagtcactgattagattaatccacaagtattgaattttagtcaatcttggtggcccggtttaactggatgttttgcttaaaaggaaggcagcaagatgcaggggttatggtttccagccccagcttggtcacttgcattctgtgtgtccttagctaaagtactgaatctccatggtctaactttctcctctctaaactgggaataattttacagtgggcaaagataattgagagaataaaaagagatgtgatgagtgtgaaaattctctgtaaatttgtcataatgtctataaacataatcgataaaacattgtataactgggtcttaatattttcttaatgaaagagctggaaataactgtactggtcaatttagaataaaggtaatcttttcagagcatgcctttgtatacacactttgttattagtgatctagtaatgttcataaatccagttgtatttagatcttcatgaccattgactatcagttcccatttcaggtctgcacattgcagtggttctgtgccctgggtccattcagtgatttccctgtgttccatcttctgttgaatccacaactgttgttctgtgtataatttctcttccttgctgtgtatgattacattctattatttgtaacaataacagaccaaaaacaatagaagcagccatgtctggaggtgactggaaggtggagaagccatagattttcaagccctgtgccataaattatgtgagattggccctttccttaatagtgctgaacaactttcacttgtgaggtgatgcagaggggagaactctaatttttatttcttcttttgagcgtctccggtcctcttatccttataaacaaataacggacttctatttaatgtgaagcctgttgctttctgaacagagtcaaggtggcgtatcttcagagtaactaatgtctggggtttgttttgtttttctaaaattgttcttgagccagctgtggtgtaagtggtaatgaaccccaatgggtatcagaagatctctgctcaaatcccggttttaccggcaatgagctgtgtggcactgacaggtgtcctgttctcccagagtttctttcccaatttgaaaaataaaaaatgataatctttatactccagtctcttttaatgatgaatatacatttatatatatacttttatatatttaatataatatttaatagtataaatatgtatttatgttattattatgtaataatgtatgtaacactccctgctaattcagtttgtctctttgacatgtaaagtaaataatcacctattattataataatgtaataataacacaaatattattatgtaataacatatatatttatgtatattgtttatatacatttaaatatatataaatatacatttattagctaataatttgatatatgtatggtaattcaacatgtatgagttatattcactatttcatgtttaggcagctgtattttaagtgaactatactaaatatttgaaaggcttttgttatcaagggctaagtctcctattttttgatatagcattacaatgtacattttttatatacaaaatatagaatacactgatttccctcaaggtcataaattcccaactggtcattaatctgagaatattgaattttgagtatattctaacatagaatcatttacttcagtgtttctccatcatcacagcacattggaacaaccagggacttttaattaaaaatacctgggctccaatccaatacaattaaaccagaatctcctagattggcactggaaagaaggagtaggacaaaagaacattttatttctatccatgggccaaagtccactcagaaaaaaagtataaattggatctaggtgattgtttactttacatgtcaamgagacacacactaaattagcagggagtgttataaaaactttggagtgcaagctcacagctgtcttaataagaagagaaggcttcaatggaaccttttgtggtcctggtgctgtgtctctcttttatgcttctcttttcactctggagacagagctgtaggagaaggaagctccctcctggccccactcctcttcctattattggaaatatgctacagatagatgttaaggacatctgcaaatctttcaccaatgtaagtctgccttatgttcctccagccaattgcaaagggtaagttatttgactgctatttttagacaaaatatattcctggaagcacactattataatagatcattgtaaagcaaaatactccctctgaacttctttgatgtttcttttgtcttcctatttttttttttttgagacggagtctcgctctattgcccaggctggagtgcagtggcactatctccactcactgcaagctctgcctcccaggttcacaccattctcctgcctcagcctcccccgagtaactgggactacaggtgccctccaccatgcccggctaattttttgtatgttttagtagagacagggtttcaccgtgttagccagaatggtctcagtctcctgacctcatgatctgcctgccttggcctcccaaagtgctgggattacatgtgtgagccaccgtacctggcctcttttgtctttctaagtctgtcattgtcagaaatagcggagtgagttgatgcattttgtgaatacagaaacattggggtcattgtattatataatcatttaatacagtggcaaaagtttaaagtgctgtttctcctctttgtttcacagtgttttgctatgatttttgactgaaggtgaagggaagtgtgtgtgattagaaatttcatccartaagttctctactatagtagtcatgtgttttattcagaatggtcatgaaaattgaacttctctgaagattcatttgatggctgatgtgaaataaatatctgtgggttcagggcaaacataagtgcatgaaagaaagaagtaatcagtcagggcccaataggtrgttaacagaattcttttggattctgaagaaagccactgtctgtggccaaggttgctggagaatggaagaaattgttcttccaggagatgctgaatgtcctgattctaactttgtggtgcttcatcgttccatattggtaataccagcagttacaaactggactgggcattagaatcacctggggtgacactgtaaatacagatttctagggttcatcacaggactgctgtatcagaatcctcatgttaagagctttacaagtgaccctgaagtctttagctgggtagtggcctcaaggtggacatgggggattgattaattgctcaagcatcagtttaaattagcagagattccagtttggagcttctacatattacctgtgggactctgagaatgaatctgcaattctctggcctcagtttcttcatttttaaaacaggtcaaatgaatgtgctgaatgtgttgaagtgaggatgaactgtgtgatttgtgtaccaattgcctgggtcattgcgtggcacatcacaggccatctataagtggcagctataacaatcaccatcacatttatgtacaaaattcagaaatatcgaatctatgtgtggcaaatatgaacattaaaaaatacaatgaaaatgtcagtctgaatcatacatagtatttggagcaaatagcgacttattttgctgctatttgcatttcctttcccagttctcaaaagtctatggtcctgtgttcaccgtgtattttggcatgaatcccatagtggtgtttcatggatatgaggcagtgaaggaagccctgattgataatggagaggagttttctggaagaggcaattccccaatatctcaaagaattactaaaggacttggtaggtgcacatatttctgtgtcagctttggtaactggggtgagggggatggaaaacagagccctaaaaagcttctcagcagagcttagcctatctgcatggctgccragtgttgcagcactttcttccttggctgtgaattctcccagtttctgcccctttttttattaggaatcatttccagcaatggaaagagatggaaggagatccggcgtttctccctcacaaccttgcggaattttgggatggggaagargagcattgaggaccgtgttcaagaggaagctcactgccttgtggaggagttgagaaaaaccaarggtgggtgactctactctgcgtcattgaccttaacagttacctstcttcactagtgacgtccttggaaacatttcaggggtggccaggtcttcattgcgcatcctggttgtcagccctcaggtggtggagggagatttgaagcacagagacaagggaggttttgtgtatctgtgctttgcctgtataaatgtgttggttcatagggtgtaggaataaaaggtcatttaatcctattttctgctcaattttgtttccttgttttcaaatcagaaattataaataagggtcttgagttcatttttgaagagttaaagaaggtttcccccatagcataaatctgcattacctccaccagaacatttcaccagagaacacttggaaagtggacatggtgaaagtgacctcatcacacttcatgaaatatgaaccaagttatatgtgctttcatttaattcragttttttcatatggtcatactcacatgtctggaaattccttccaggtccatgcctacagctctggccagcaatgacactatgtatggttttacttgcttaggtatatctcagtacagttttcatcagttcttatttctcgggaaacacagtactatttgaaaactgtcaggattaattatttcttgttaaccactacttactgtagcaattaatatattttaagtaaatataatctatagtataactcagcaaatacacaaatactaatttgtaaataatttgtttaactagattttaactattatgaaaaactctttatcctgtcttctttaaatgtaatttggctatgttttcagttttgtcatcttttttcccctgtattggttcttagctttgaaatttgtgctaatcatttttctcccactgccaatttactcacctatgaagtgcttgttataatcaatctgattatcagctgrgatataaaattacctttttaaattcactctcccaaatgcagtaaaaaaaaaaaaacctggatatcagattgtacctgagaaacacacacacacacacacacacacacactctctctctctctctctctctctctctctctctctcaccaaggcttcccaaattacctttcacccccttggctaaaacaacagtttttctgaaactttagagccctgtaatgtttaaaggagtctggcatagaagcagctaactcagcaggtttcttgttgttcaatgttccaactttattcacaaccctttcatttcgtgtcactcttatttaggacctatagatgtgaatttgggcaccctttccatttatgttcactagtcacttggttacagcaatttcattttagagattccttcaccgaataaaagcctttttaataatttctttacctgtaaaattacagatttggcctaacttatggtcaaatttaaaactttattaaaacatacttatcttgatgactatactgaataatatcccagaatccacaagagtagttttgcccaaatgaattaaatttggaagatgattggaaatgataaacattatttccaaaggaaggaaattcattttttacaaattgaaaaaataaataaaaagattccatttatcaatttactttttggttagctttacwgggatttagatttgaaataaaaagttagcattttacttatttagataaacaaatctgttatacttaatgctcatttatattagtttttcttctcatatcatatggatgtacttgcttttcacatttgttccctaaaacacatgaattcacccacaatctccctaactttattcccattggttcagcacattatactttcagctatatgacatttctaggtccccaacttttctcttcctatctctgtgttttattgtccagaggctttgcaaacagacatgattctgctctaaaaacttgaattattaggatttcaaaaaagtcttctttttccttccaaaataaaagacacttggrgttaaaagagtttaaataaaggcagtggatgtgaataaccacatgcgaaatgacattgtttagctagcctgtaatgctcaactcatatttarggtaaaagtaatgtgtttatttcatccatgctgattttttttggacacatggggaatttgtaagatattgtttaaaatttctaaatttcctttatgtcttaacaaatgcaaatcttttaaatatttattttttaataattttttwaaaaatttttaaatctttagcttcaccctgtgatcccactttcatcctgggctgtgctccctgcaatgtgatctgctccgttgttttccagaaacgatttgattataaagatcagaattttctcaccctgatgaaaagattcaatgaaaacttcaggattctgaactccccatggatccaggtaaggccaagattttattttccttggaaaccatttattcaaggttgtagggaagacttggtttaaaaatgagaaaattgatactaaaatgcttttatacaataaaaatgatgtatgagtgaagaaaataattaccacctttgatttcctrttcaaaattttcagcctccaatctttaggtacagaaaattgctatatgtgcacaataaaaatttccccatcagaagtgcaaggggtcagggaattccctttcctagccaagcaaagctgtgaacagatggcacctggaaaattgggtcactcccaccctaatactgygcttttcyagtggtcttagtaaatggcacaccaggagattatatcctgcacctggcttggagggtcccatgcccacgaagcctcactcattgccagcacagcagtctgagatccaactgcaaggcagcagcgaggctgggggaggggtgtccaccattgctgaggcttgagtaggtaaacaaaaccaccaggaagctcgatctgggtggagcctactgcagctcaaggaggcctgcctgcctctgtagaatccacttctcggggcagggcatagctgaacaaaaggcagcagaaacctctgcacacttaaatgtccctgtctgacagctttaaagagagtagtggttctcccagcatggagtatgagatctgagaatggacagacggtctcctcaagtgggtccctgacccctgaatagcctaactgggaggcaccccctagtaggggcagactgacacctcacagggctgggtacccctctgagacaaaacttccagaggaacgatcgggcagcaacatttgctgttcagcaatatttgctgttctgcagcctctgctgctgatacccaggcaaacagggtctggagtggacctccagcagactcgcggctgaggatcctgactgttagaaggaaatctaacaaacagaaaggacatccacaccaaaaccccatctgtacatcaccatcatcaaagaccaaaggtagataaaagcacaaagatgggggaaaaacacaacagaaaaactgaaaattctaaaaatcagagtgcctctcctcctccaaaggaatgcagctcctcaccagcaacggaacaaagctggatggggaatgactttgacgagctgagagaagaaggcttcagatgatcaaatttctccaacctaaaggaggaagctcaaacccatcgcaaagaagttaaaaaccttaaaaaaagattagatgaatggctaactagaataaccaatgcagagaagtccttaaaggacctgatggagctgaaaaccatggcaggagaactacgtgacacatgcacaagcttcagtagttgattcaatcaaatggaagaaagggtatcagtgattgaagatcaaacaaatgaaatgaagcgagaagasaagtttggagaaaaaagaataaaaagaaatgcacaaagcctccaagaaatatgggactatgtgaaaagaccaaatctacgtctgattggtgtatctgaaagtgayggggagaatggaactgagttggaaaacactctgcagggtattatccaggagaacttccccaacctaggaaggcaggctaacattcaaattcaggaaatacagagaacgccacaaagatactcctygagaagagcaactccaagacacataattgtcagattcaccaaagttgaaatgaaggaaaaaatgttaagggtagccattgagaaaggkcgggttacccacaaagggaagcccatcagactaacagcggatctctcggcagaaactctacaagccagaagagagtggtggccaatattcaacattcttaaagaaaagaattttcaacccagaatttcatatccagccaaactaagcttcataagtgaaggagaaataaaatcctttacatacaagcaaatgctgagagattttgtcactaccaggcctgccctaaaagagctcctgaaggaagcactaaacatggaaaggaacaaccggtaccagccactgcaaaaacatcagattgtaaagaccatcaaggctcggaagaaactgcatcaactaacgagcaaaataaccagctaacatcataatgacaggatcaaattcaagcataacaatattaaccttaaatgtaaatgggttaaacgctccaattaaaagacacagactgggaaactggataaagagtcaagacccatcagtgtgctstattgaggaaacccatctcatgtgcagagacgcacataggctcaaaataaagggaaggaggaagatctatcaagcaaatggaaaacaaaaaaaggcaggggttgcaatcctaatctctgataaaacagactttaaaccaacaaagattaaaagagacaaagaaggccattacataatggtaaagggatcaattcaataagaagagctaactatcctaaatatatatgcacccaatacaggagcacccagactcatcaagcaagtccttagagacctataaagagacttagactcccacacaacaataatgggagactttaacaccccactgtcaacattagacagatcaacgagacagaaagttaacaaggatatccaggaattgaactcagctctgcaccaagcggacctaatagacatctacagaactctccacccctaatcaacagaatatacattcttctcagcaccacaccacacttattccaaaattgaccacatagttggaagtaaagcactcctcagcagatgtaaaagaacagaaattacaacaaattgtctctcagaccacagcgcaatcaaactagaactcaggattaagaaactcactcaaaaccactcaactacatggacactgaacaacctgctcctgaatgactactgggtacctaaagaaatgaaggcagaaataaagatgttctttgaaaccaatgagaacaaagacacaacataccagaatctctgggacacatttaatgcagtgtgtagagggaaatttatagcactaaatacccacaagagaaagcaggaaagatctaaaattgacaccctaacatcacaattgaaagaactagagaagcaagaacaaacacattcaaaagctagcagaaggcaagaaataactaagatcagagcagaactgaaggaaatagagacacaaaaaacccttcaaaaaatcaatgaatccaggagctagttttttgaagatcaacaaaattgatagaccattaggaagactaataaagaagaaaagagagaaaactcaaatagatacaataaaaaatgataaaggggatatcacaaccgatcccacagaaatacaaattaccatcagagcatactataaacacctctacacaagtaaattagaaaatctagaagaaatggataaatttctccacacatacaccctcccaagactaaaccaggaagaagttgaatctctgaatagaccaataacaggctctgaaattgaggcaataattaacagcttaccaaccaaaaaaagtccaggaccaggtggattcacagccaaattctatcagaggtacaaggaggagctggtaccattccttctgaaattattccaatcaatagaaaaagagggaatcctccctaactcattttatgaggccagcatcatcctgataacaaagcctggcagagacacaacaaaaaacgagaattttagaccaatatccctgatgaacatcaatgcaagaatcctcaataaattacggcaaactgaatccagcagcacataaaaagcttayccaccacgatcaagtgggcatcatccctgggatgcaaggctggttcaatatacgcaaatcagtaaatgtaatccagcatataaacagaaccaagacaaaaaccacatgattatctcaatagatgcagaaaaggccttttaaaaaattcaacagcacttcagtctaaaaacactcaataaattaggtattgatgggaygtatctaaaaataataagagctatttatgacaaacccacagccartatcatactgaatgggcaaaaactggaagcattccctttgaaaactggcacaagacagggatgccctctctcaccactcctattcaacatagtgttggaggttctggccaaggcaatcaggcaggggaaagaaataaaaggtattcagttagaaaaagaggaactcaaattgtccctgtttgcagatgacatgactgtatatctagaaaaccccatcatctcagcccaaaatctccttaagctgataagcaacttcagcaatgtctcgggatacaaaatcaatgtgcaaaaatcacaaacattcctctacaccaataacagacaaacagagagccaaatcatgagtgaacttccattcacaattgcttcaaagagaataaaatacctaggaatccaacttacaagggacgtgaaggacctcttcaaggagaactacaaacaactgctcaacaaaataaaagaggctacaaacaaatggaagaacattccatgctcatgggtaggaaaaatcaatatcatgaaaatggccatactgcccaaggtaatttatagattcaatgccatccccatcaagcaccaatgactttcttcacagaattggaaaaaactactttaaagttcatatggaaccaaaaaagagccygcattgtcaagtcaatcctaagccaaaagaacaaagctggaggcatcaggctacctgacttcaaactattctacaaggctgcattaaccaaaacagcttggtactggtaccaaaacagagatatagaycaatggaacaaaacagagccctcagaaataataccacagatctacaactatcygatctttgacaaacctgasaaaaacaagaaatggggaaaggattccctattcaacaaatgttgctgggaaaactggctagccayatgtagaaagctgaaactggatcccttccttacaccttatacaaaaattaattcaagatggatcaaagacttaaatgttagacctaaaaccataaaaattctagaagaaaacctaggcaataccattcaggacataggcatgggcaaggacttcatgtctaaaacaccaaaagcaatggcaacaaaagccaaaattgacaaatgggacctaataaaactaaagagcttctgcaaagcaaaagaaactaccatcagagtgaataggcatcctacagaatgggagaaaaattttgcwatctactcatctgacaaagrgctaatatccagaatctacaatgaactcaaacaaatttacaagaaaaaaaccaaacaaccccatcaacaagtgggcaaaggatacgaacagacacttctcaaaagaagacatttatgcagccaaaaaacacatgaaaaaatgctcatcatcactggccatcagagaaatgcaaatcaaaaccacaatgagataccatttcacaccagttagaatggcaatcattaaaaagtcaggaaacaacaggttctggagaggatgtggagaaataggagcacttttacactgttggtgggactgtaaactagttcaaccattatgaaagacagtgtggtgattcctcagggatctagaactagaaataccatttgacccagccatcccattactgggtatataccctaaggattataagtcatgctgctttaaagacacatgcacacgtatgtttattgtggcactattcacaatarcaaagacttggaaccaagccaaatgtgcaacaatgatagactggattaagaaaatgtggcacatagacaccatggaatactatgcagccataaaaaaggatgagttcatgttctttgtagggacatggatgaagctagaaaccatcgttctcagcatactatcacaaggacaaaaaaaccaaacactgcatattctcattcataggtgggaattgaacaatgagaacacttgaacacaggaaggggaacattacacactggggtctgttgtgtggtggggggagggggaagggatagcattgggagatatacctaatgtatatgacgagttattgggtgcagtacaccaacctggcacatgtatacatatgtgacaaacctgcactttgtgcacatataccctagaacttaaagtrtaataaaaaatgtatatatgtataaaaatttcccttcaaaatggacatgatgtctyattcatatttatagttataatttcaatcagggcttggtgtaagatacatatatcttatgacatgtttatatttaatattcttttctcttttaggtctgcaataatttccctctactcattgattgtttcccaggaactcacaacaaagtgcttaaaaatgttgctcttacacgaagttacattagggagaaagtaaaagaacaccaagcatcactggatgttaacaatcctcgggactttatsgattgcttcctgatcaaaatggagcaggtaagatattagcaacagatcagtattttgatttcttgtccattttgtgattcatcgaatccttctgtaatttactaaggatgtttaaatgatcaggccagtaatgcttgacaagcatcttaattacttattgtatttatgggcctgcactaaacatcatggaaaatacaaaattgtccaatggctagaatgcatagaccctcttcttgaaataaaaataatctacatgagtagaataatatagacactgcagtcaaatggaaacaattataaataagtagaaaatacaaaatatcctaccacaaactgaagatgratatcaatattgcacatagattatgtgacaatggaaaagaatggcttatcataaatgggcttcctgtatgccctgcacattgacatagcccttaatatattttcagtgtggaacagaagaaaggtttcagatggaatgagtagtttgtggagaggtgagtggtgggaaagagttggtggatggaagagagaaggtttaatttagtgtaacctaaaatgaatttgcacaaaggagttggaggttgatgtttatcaggtaacctgtgagagtgaatcctgttttcattgaactatttattgaaaaagtatattttttcctattgaattgtcttgacaacctcattaaaaaccagttgagtataaatgtgaggatttgtttgtgggctctcaattctactccattggtctgtctgtccttatgtcagtagtacctcattttgaagtcttaattactgtagttttgtgtcaagttttcaaatmaaaaagtatgagtcctcaaagcttttttcaagactatttgggcttttttgtgttcattcagtcrcaacaaaaatttaagaataaacttgtcaatttctgcaaacaagcccataggaattttaagattgcattaaatctatagattaattcagaaaattatgacattttaaatattgagatgaaattcatataccatatatcacccaatttaaagtgtacamtttaatsgtattttgtttaattacaatactgtgcaactgaggtaggaggtgggagtcaactccagaggtgggtcttggacatgggaccagattgatggctagctaaaacagggccaggatgaaagcagctttcaatcattcctgcccaccagtatgccgtgtcaatttactattcccatggcaacacccaggagttacctcccctttccatggcacccaatgatccaaaagataggaccccttccttgcacaaactgtcccttaatatgcatgcaattaaaagtgggtataaaaatgaccacaaaactgccctgagcttctactctctgcctatatcatagccctgctctgcaggagccctcgcagagctgtaccactgcctgttcaacaaagctgttttcttctacctctgagttgcctttgaattcttttctgggcaaagccaggaaccctcccaggctaagctccacattgggactcgcctgccctgcatcacaactaccattcctctctactttcaaaacttttttatcactccacagaaacatactatatcattaaatagttacacctcattcccaactccatcatgtagtaaacattaatcaactatctttatggatttgcctataatgagtataacatttgacccatggcatatgtgatcttttttcctggcttctttcacttagcataatgatatggagggtcaactaagatttagcatgtgatagtactttgttgttttgtgtggttcaataatattccattttcatgtacacatatgacaatttgcttatcattcatctgttgatgatcatttgtgttattttcaccttttggctcttataaataatgttgctatgaacatttgtatacaagttacttcatgaatatattttcatttttccagggtatagtcctaggagtgttatttctgggtcatatggtaattttatgtttaactttttgagaaacaactaaacatttctacagtaaatgcaccattttaaaatcccatcagcaatgtttgagggttcctcttttccatattatagccaatatttgtaattttctgttttttgtgtcagtgcaaagtggtatttcattgtggttttgacttgacctatgatattaattagctttttaccatttttacatgttctttagagaaatgttattcaaggcccttgttcatttttattttattttatttatttattttggagacaaggcctctctgtgttgctcaggttggagtacagtgctgtcatcttggctcactgcaacctctgactcttggkctcaagtgattctcctacctcagcctcccaagtagctaggagcacaggcacaaayccccacacccagctaatttttgtattttttttgtacaaacttggtttcaccatgtttcctaggctggtctcaaactcctgagctcaagcagtccaccsatgttggccctcccaaagcactgggattgcagttgtgaggcaccacacctggccctttgcttatttctatactgggttgcttgwcatttgttgttgaactgtaggtaattgtttatggattctgggcattaaacccttactaaatacgtatgaaatacaaatattttctcccattctacaggttgtcatttcacatttttaattttgtcctttgatgaacaaacattttaatttggtgaggcccagtttatctctcttattttagttgttttggtgtcaaatctatgyatccacttccaattctgaaggcattaakatttaaccgatgttttattctaagaattgtatagttttagttcacatttaagtttttcgttcactttcagttatattttgcataagagtgagataggggttcaacttcattcttttgtatgtggctacccagttgtcccagcactgtttgttgaagaaacgcttcctttatttatttatttttttttgmaactcttcctttagattaaatgatcttggtacatttgttgaaaatgaaccgggcatagatgattaggtttatgtttggatttcaattttattccactggtctttatttctttccttttgccagtaccatgctgttttgactactatagttttgttttgaagtctggaaatttggaaattgagtcctctccctgtagttrcatataaattcaggattggcttttccatttttgcacaaataaaaattttaaaaaggacattggaattgtgacagtgattacattcaatctttagattacttttggaagcattgccatcttaacaattttaagtctttcattattattattattatactttaagttttagggtacatgtgcacaatgtgcacatttgttacatatgtatacgtgtgccatttcaatcctttaaaatgacatggtttgccatttatttagatactccttatttttctaagcaacatttcatagttttcagtcttttatcttcttgattataggttctcagggcttttggcccttttgatgctattgcaaatgtaactatttccttgattttattttcatattgctcattgctgatataaacagacacaactgatatctggaccaatcttacrtcctaaaattaagctgaaaacatttatcagctctagttgttttttgtgggttatatggacttttctttatatataattgtgttatcttaaaatagaaatagttttacgtcttcctttcttacctaaatgccttttatttctctttcttgtctaattgttttggctaggaccttaagtgctatgctgaatagcagtagtgaaattggatatacttggatcttttccccctgattttggggtataagcttttagattttcacaatttgatataaaatacctttggaatttttataaatacattttctcataagaaatttcccttctattcatatctttgagtgattttatcaggaaaagtattgaattttgtcttatgctttctcagcttctattcagatggtctatcttgttagatttttcctttctttctaatatggtggtgtattacattgattgattttcttattgaagcactcttgcactcctcatatagatcccatttagttatggcacataatccttaattttttttaaaaaaatccrtaatatacaagttgctacattatttctctttcttgtctaattgttttggctgggaccttaagaacgatgctgaatagcagtagtaaaagtagatatacttgggtttttttaccccctgattttagggcataagcttttagattttcacaatttgatataaaacatctttggaatttttataaatacattttattatgataaggaattttcccttctattcatattyttgagtgattttttatattatactttaggttctgggatacatgtgcagaatgtgcaggtttgttacataggtatacatgtgccatggtggtttgctgcacccatcaacctgtcatctaggttttaagccccgcatgaattaagtatttgtcccagtgctctccctccccttgctccccaccccccaacaggccctggtgtgtcatgtttccctccctgtgtccatgtgttctcattgttcaactcccacttttgagtgagaacatgcagtgtttggttttctgttcctgtgttagtttgctgagaacgacgtttccagcttcatccatgtccctgaaaaggacatgaattcattcttttttatggctgcatagtactccatggtgcatatgtgccatattttctttatctagtctatcactgatgggcatttgggttggttccaagtctttgctattgtaaatagtgctgcaataaacacacttgtacatgtgtctttagagtagaatgatttataatcctttgagtatatacccagtaatgggattgctgggtcaaatggtatttctggttttagattcttgaggaattgccacactgtcttccacaatgactgaagtaatttacactcccaccaacagtgtaaaagtgtttctatttctctgcatcatcgccagcatctgttgtttcctgactttttaatgatcaccattctaactggtgtgagatggtatctcattgttaattttatgtgtggatattgtaaatgggattactttttaaaattattttttaaattgttcgctgtaggaatatagaaatactaccgatttttgtatattattttgtatcttgcaactttacggaatttgtttattatttctcatagttttttagtggagtctttatgtttttttaaatataagattatattctctgcaaatgagtataatttgacttcttccattctaattgggatcccctttgtatctttctctgattgctctagctaggtattccagtacaatgttgaataacagtggtgaaagtaagcatccttgttgttttccagaccttagaggaaaggcttttagtttttccctatttagtatgttactagctgttggtcttttgtagatagcttttactatggtgaggtatgttccttctataccctgttttttttagggcttttaccatgaaggggtgttgaattttatcgaataatttttcagtatcaattgaagtgaccatatgctttcgttctttattctgttgatatgatgtaccacatcaattaattggcatatgttaaagcacccttgcatacagggataaatcccacttggttgtgatgagtgagctctttaatgtattcattaatttggtttgcagctattttcttgaggatttttgcatgaatattcctcagagacattggcctataacttttttttttaatgtgtctttggttttrttatcagagtaatactggccttatagaattaatttggaagtattccctccttcactattttgtggaatagtttgagtaggattggtattagttctttaaatatttgctagaattcatcattgaagtcattgggtcttgagcttttctctactaggatgctttctcttgagttcaatctgattatttgctataattttgttcaggttttggatttcttcatggttcaatttcagtaggttgtatgtatctaggaatttgttcattacttctaagttttccaatttattggtatatagttgttcatggtagccaccaatgatcctttgaatacctgtgatatcagttgtaatgccttctttttcatctctgacttatttggatcatgtcayatttttccttagtctggctaaaggtttgtcagctttctttaatgcttctaaagaacaactttttgctttgttaatattttgtattgttttctttatttcaatttatttctgctctgagtttattatttcttttctcctactaattttgggtttggtttgctccagctttcgtagttttttaaagtatattgttaggttgtttatttgatgtttttcttctattttgatagttgacacttacagctattaactttattcttagtaccacttttgctgaatcccataggttttgatatgctgtgttttctcatcatttgtttcaagaaatttttcaattttcttcttaatttcttcattgtcccactgttcactcagaagcatattgtttaattttcatgtatttgaacttatacaaaattgacttaagctggattaatgacttaaatgtaagctccaaaactataaaaaccctagcagaaaatctgggcaatacaattcaggacatctttgggagttttattattaaattcctggaagtagtcttcattgggtttaatctgcttggtgttctatcagcttcttgtacttagatagtgatacctttctctagttttggaaagttctctgttattttcccttaaataaattttctactcccttctctttctctacctcctctttaaggccaataactcttagatttgcattttgagactattttctagatcctgtaggtgtgcttcattgttttttattcttttttcttttgtctcttctaacagtattttcaaataggttgtgttaaagctcactaattctttcttctgctggatcaattctattctattattctactaaagactccaatgcattcttcagtatgccaattgcatgtttcagctccacaatctctgcttgactcttgtaaattatttcagtctcttcgttatgtttatctgatagaattgtgaatttcttctctgtgttattttgaatatctttaggtttcctcaaaacaactatcttatattctctggctgaaagatcacacatctctgtttctccaggattggtccctggtgccttatttagttcgtgtggtgaggtcatgttttcctggattttctttatacttgtagatattcatcgggggctgggcattctagagttaggtatttttgttgtctttgtagtctggggttttttttgtacacatccttcttgttagrctttccagatattaaaaaggacttaacctattttcgatttgcccctagaatactgcaccrgcagtgaactgcactttttttaataaatgggaaatgagttaagtgttgtgatctaagctgtatctgctttaggggcactccaagcccaataatgcagtggttcttgaagacttgtagaggtactgccttgatggtcttggacaagatccaagagaattctctggattaccagaaactcttgttcccttcccttaatttctcccaaataaacaaaktctctctctctgttctgagtcaattgaaactggggatggaatgacacaagcactcatgtatccaccaccactgtgactgcactgggtgagacttaaaacaagcagagcactgggtcttgcccaaagcttgctgcaaccattccctggctactgcctatgtttccaaggatctggggccctacaatcagttggtggtgaatccagccaggcctgtgtccttcccttcagtgaagcaaattcttccagtacccaggcatgtccagaggtaccacccagaagccagggactagagtcaaaaaccttagaagtctatttggtgttctattgtactgcagctgagctgacactcaaaccacaaaatgcagtccttctcactcttccctttcctttccaaaggcagtggaatctcaccccctgagcagtgctaccacaggcccatgcagaatacagaccctgtacaagagccaagtcctggttttggagagtccaggagtgcacttggtrctctaccctcctgtgatcaagctagtacctagttgcaagacaaagtcgactttatatttcactctgatttctcaagtagaaggagtctttcctgatagccagctagctgggaatgtgttgagtcttacctgaagccggtaagcctcagagacttacccaaagccctcaacatagtacctgggtattgctgctagctattcaagccccccactcctcaagcagaagaaagcagtttcttttggaagtgaaaactgtgcagcttgggattaggagaggggggatgtcagcactcccttacccatccccagctgctgtctcagtaggttgcacctcccaccccagtctactgtctctgggcccagttcagcaccaggactcacataaaagttacagtacttgtagccaacactgcctttcaggtttatttaccatcccagagccctatagtccacagtgwtgaggcttgtagaaactcggttccaaccactggtatcagagattcacctctggccagggctggtttaaatgctccctctgtgagtgggcatcagctgattttgggcctgttttcctttctgccttaacagaactgcactaattttatgctctataattgctgtgctctccctccctcagtactcagaaatactctctgaaccatgccactgctgccaggggaagagaggatgtcagtaattcaatagtattttttctatctcttcatttcctctttcagtgatatatatttaaatcaaggtgcatgctcatctgattttggttcttatgaaggtacattttgtgtagatagctgttaaactgatgtctttgcttggggaataatcaatgaagcattcaattcygtcatcttgctccactctcccatttgtatatcttcttttgagaaatttctgttcatgttgtttgcccactttctaatgggattattyggatttttttcttgctgttttgagtttcttgtagactctggaaaatagtcctttgttgaaggtatattttgcaaatattttctcccattctgtaggttgtatgtttactctgcttgtcatttcttttactgtgcagaagctctttagtttaattaggtcccattgtcaactgtttttgttgaaattgcttttaaacattgagtcataaatccttagcctacaccaatgctcagaagagttttttrtaggttttttctagaatttttatgatttcargtctcatatttaagtctttagtccatcttgagttaatttttgtatgtggtgagatataagaatcatatttcattcttctacatgttcccctgggtaatatcagccaagcacaaatcccrcagctaccagcgtaggtggctctttcctgcaagaaccacctcctagctggaagccaataggcacagcctattacaaacatctgctggcaaaataacatagcatttgggaaggagaaaacttttatcgtatctcagctaacaccatacccacatcaccccagctaatcggaaggtcttgagtgtgttcacaaacccaatacattgmtagtacagctggcatttgagaaaattaccacactaaacctatttataaccaagtaaatcttacaaagtctatgtcactctcttgccacctcgatcagaggtggtgcttgcacctgctgctaggagaccagaggacagttaggcccagttaagccccattcaacattgccctcctttgtagcaaagagtggaacccaagcactgtacatctctcaaacctttccacagcctgaggcatcagagatttccagttggctgacaaagatgtcaatgttcaattatcctcagaaggaagagccaatattacaggtgaataatcataagccaaatggactgttaaagagagagcaatggagcttattggtcaattcataagaagaaagaatctacaactcacaaacacgcacacacacatacacacaaataaagtaaaaagaagctggcagaggtgaaaccctgagagacttagtaatccatggaaagggcaggtaggagtgttctcagcctccctacccaatttggcagactgctgggatctgaactcaaggtgaccttccttgccttcatgagcacaagtactggagtaggctgtggttttgagacttctcgaggatattaccttgttcacacaaggtccctttccttttccttggatctgagctgtttttaactattttggtagaattcactagtgaagtaatcttgagctggaactttttttgaggggggtggagttcttgattactaattcaaataattttcttattgtaggtgtattcacactttcaatttatgagaactttattcgattagtcccttggccttggcatttgcattgcccctactcttctttatccaatataggcagttaatgcctcaagtttttgtattaataattgccatttctcttcactttgtattttcctatttattcctgaacttattcctaagaataagttgcctgttgcctatctggattacaactttgttagacctgtcttgtctttgtgaactcattctctttcactatatttcattcttggttttgttgacatatttgttttacacatttcagctttgtaatgaatatgtaggtgatactgagtctttgtaaatttttgacagaagaaaattgcaaactcttgattcaagagtgtaacacttttcatgatatagccctaatttacctatatctataaactaaaattgtgttcacttacaaataataaaaaaatcataaaaatgaatgtgttaggctgttcttgcatttctataaagaaatatctgaggccagataatttataagaacatgaggcccaattggctcacggttctgcaggctgtacaagcatgatgcttgcatctgctcagcttttggagagtcctcagggagtatttgctcatagcagaaggcaaagcaggaacaggcacgtcacatggcaagaggagaagcaagttggggaaacagttttaaaaaaccagatcttatgtgaactcacttattatcaggataacatcaagggaaataatgctcatgagaaatctacccccatgacccaatcacctctcaccagattccacctataacaatggggattaagtttcaacaaaagatttgggagagataaatatttattatccaaactatatcaagagcttaatcaaatagttggcttatatatctcaaatacaagaagtcttatagtgggctagactagaaataatatggtagccctgaagcatgagagagtcaagtgccttcttttttttttttttttttttaccatatttagtatagaagtcttcattactatgatcaaatgctcatgtcccaagatgatgtcaatcctacctcccccttcacatttgtgttttgagtaatgaggagaaaagagaagaagattcatgttctggtttgaatgtgtcctctacagttcatgtgctaaaagtgaatgcccaatgcaacagtgtttgtgggtgcagcctaacaaaacatgactaggtcatcagtgttctgacctcataaatatactcatgttgttattgcaagagtggggtagttcttgatagcttgttataaatgtgagtgtgccccccccaattgctctcactcttaccctttcttgcccttctactttttgccatgcaatgaaataggatgaaggccattgccagaagccagtgccatgctcttggacttcccagccttcagaatcatcagaaataaatttcttttctttataaattaccaagtstatagtattctgttttataacacaaattgaagtaagacagggcatcagtatacttctgcttttatttctggggaaagaaatattctgtgtgactaacctaagcagcgaatgatttcatgaatggaacttgtaggtctgtcaggaaataaagtttgagtcaactgatctgcagtttctgccataccacacagttgctttttctaatactgtactgtccagtatctcttttggctaactttaaaaaatagtatgttttttaaaatttagtgtatttagatatactggcacataatttgtcagataattgcatgaaatcacttctaggaaaaggacaaccaaaagtcagaattcaatattgaaaacttggttggcactgtagctgatctatttgttgctggaacagagacaacaagcaccactctgagatatggactcctgctcctgctgaagcacccagaggtcacaggtaggaccacagatgatgaacaaagtgaatttcagaacaatgctgagaagatggtgccagtatcctccaccttgtttctctcagagaaggctcattctttaaatttctgtgtcatcagctgtaatctgtctaaatttgatgacacaatttaaaatgacatctttgtacaatggaggaggatgacagagatcagtaraaacagtatggcagtagcaaaataagtaaagcactgatgaagtgtctggatttcagcaaaggtaatttgtggtaaggagagccagcataaattgccctagtattgaatgttggttttattatgaaaagtccactttgaacagtaggttcatttctcattttaaaaattccatgctctaatgctgtggtggggagatgaaaacaatctttattgaagcataagtggaaattctagaattgtactgaggcatcctgacataaattccagtctgggaagtaatctaaaagttagtctcttacaaaggtgtttctatttaagcagaggccatacctaaaggaattttattattctaggagtgtgtttcataaaaatgctatttgaccaaatagggayatttggaagggggtttaataattgcatctttcacatacaacttttctttagaatttacaatttaccyttagagtaaactctacatttccttagaatttacatttaaatagttcctgctttgcagcagataacatacctttttccctgtgtcaggatcccactgaaatttcaataactaaattacaaattaaaattatcctgctgaagtgaaaagagaggagaatagaaaatagccaataagtctttggcaaatttctaaaacatggagagacaatggagggctgacaattgacacagcatagaggatggagttgtaagtattagcagaggaagatttatcaagaggagaagctaatctgtgtcactgtgattctcataaggttcagtatttggaggcaccaagagccaaagacagtagggaatgagactgaaaagggaggctctcctgcccaagtttcctccataactccttttatcaggtacctgattttttcccactgggaaagggaagcatactctccagagaaactgagcctaagaacccctgtactcggcgacactttacagggccaggaaactgtgagatgtgaagacagaaaaaaaaaaggtttgagaaagatctattcctcagattcaaagactcagcatttttcttcatcttgcttcctgacattcagcagccagctagatactctccagagaagaaacaagtctggagaaaagacctccgtattttgccaacttaatagaaagttatctataaatgtccagcagagtgaatgaaattaaaacatccatcacaggacacaaagtcatggaatttcagagcaccagaagtaaagggaaaattaaaatctttcagagagttatatcaggtcatatataaaatatcagcattcaaacagcatcagaattctcaagcatactatcttgtgtattcatagaaaaaaagtatttgggacctacatggttgctacaaattttaccctctatactaagtttctccaatactgggggttgtgctccatctcatgtctgaaactaagtcagaagaaataatgggtgccaggaatcaggagacctcatgtaagagaatgagagtgtcagagaggctgctgtgctcctaggaaacaaccacttcagaagggaccaggtgaataatacatgtagaggagacttcaagaatcaaagagatgtgattgatagtctgagatttccctataattgggaaattattactaggagtttcaaacatgtgcaaatactctaacttgaagaatagaaaattgtgatttaactaaagaaccaaggaagaatgtgtatgtgtgyatatgtgtgtgtrtgtgtgtgtgtgtgtgcttctgtgagtatatttagaatgatgtaaacaatgaatagtgatataaccagaaattgtggtctaaatatattctggtaagtagaaggaggagaattgtgtgtgtgtacgtgtgtgggtgtgtctgtgtgtacacatataactttgtgggcgtgtgtctatatatggaatagagatggagatgaaaattctcatctctcataccagaaaatcattaaatattgtctaaaaattgttaagtaaaaaatagaaagaaatagtggttatttagaaatacaaatataaatttcagaagaaactgctagcatgctcaaagtggccacaattggaaatggaagaatgaagacagtaccattgctaattgcatcactgcccctgctccaccaccgcacacacaaatatatttataaaaccattacaatttaacattataccccatatattattttgataatacakatttgattgtttttctgtttgcaagcactgtaatttattgacttattatgttctgtttattttttaaataatgtattacttaaatttgtattgtcatatatgctaatttatagaaatgtacttatgcactgtaatgactagtttgtaggagagtggtatgtatctatattatggtaattctttttatatggctggttgtacttctggacatgtaactcatgtttgtaatgttgctgggatttttatatcatgttaatgtggccatgaattgctatgacaaatgttccatatatcttcgtttccatcagttctttcttgtgtcttgtcagctaaagtccaggaagagattgatcatgtaattggcagacacaggagcccctgcatgcaggataggagccacatgccttacactgatgctgtagtgcacgagatccagagatacagtgaccttgtccccaccggtgtgccccatgcagtgaccactgatactaagttcagaaactacctcatccccaaggtaagcttgtttctcttacactatatttctgtacttctgaaatttccawagtgctggtttggttccaaccctctaacaacacaagatgagagaagtgcaaaactcatacatgtggcagcttgatggactttctgctattttgtttggggctataaagatttataaagctaggtctccttaataggctgctcttaggtgttacactttcaaataattgttgaaaatatcagtgtgtcaatttcccaaaacactcttctgagatttttatcaaagtgacattcattgtgtagttcgatatggaaagacttaacatgttcatgcattgaattttttaattcatgaatatggttatgctcccaacttattgagctttattctattttctcagtaatgtcttattttcagtgcagtggtttacaactcttttattaggtttttcctagataattaatattttgttgtgttataattttttaattttttttatttctttgtaattggtataagtaattgtattcaatkatactattctgatgaccttatatctaacaactttcctaaatttactgatcattgctgataatttatctgtagatatacttggaatttctatgtatattattttgctatctgggttaatatgtattttatatcttattttccaatgattttgtcttcaatttatctttattgcattattgtgctggmtaggatttycaggttagcattgaacagaattggtgatagagggcatccttatttcatttctgatctgctgggggrtagagtataagaatattaatatttcactactgagaatgatgttttaagtatttttttwaaataattgacttttatttaacttcatttataaaagaattttcacgaatatrgtttgaaatgatactctacatttgttatgaaacagatagttggtattttcataaaatcccagcccccagaaggctcatgtcattccaagtgatcagactcctgtaccttccctaaataaggctagcaaactggggatggcagggagcagagcccagagcaccttggtagttttgcacagatttttttttttttttttttttttgagacggagtctcgctctgtcgcccaggctggactgcggactgcagtggcgcaatctcggctcactgcaagctccgcttcccgggttcacgccattctcctgcctcagcctcccgagtagctgggactacaggcgcccgccaccgcgcccggctaattttttgtatttttagtagagacggggtttcaccttgttagccaggatggtctcgatctcctgacctcatgatccacccgcctcggcctcccaaagtgctgggactacaggcgtgagccaccgcgcccggccttgcacagattttttaaaagccagtaacttccttctggctgttctaaaagacaaacactttggagaaaagttgtgcagtaagggaaactatcaaaaatcattctcatagaacagtaaggcagtgaggcaaacacgatctccctcatgattttaaagtctgtaatagaaattaacagtgtcatctgcagcccaattatgcactttaagatcccaaaaaattgctgctgttttaagtattttagtagatattctttatcagaaatctttaagattttagtagatatcctttatcagattagggaagttttttctcttctctcatttttatataaatttgtgtcatgaatgtgtgtgcaattttatcaaattgattctctgcatctrtttatatgattgtatatactggcctcacatccctcactaaatatacataagtatacacaaacagctggatttgttctgttacttattgttcaggacttctgtattcataagatattttggtctgcaatttttcttcctcaaaattttcttttcagagctttgataacaagataatgctggctgcataaaactaggtgagaaacgttccctaatgtgggtctgtttttattgctttcccttccttccacttttcttcgtgtgactgcttagttgtatccttgaaatgcctaaaaacctatggctcagtaccagatattatatatgaaaaaatgcagaatttcagagaacatttatctttttccagaatgtattcattcccctctcataggcaattataatgacaacacctcctgtcctgattcagaattgaatatgacatgaacacagtcaaaaattgactgtaggtatgagcttacctctctgaagttcttccgtcactggggccaattattgtctttrtaatctggaggccaattttggtctttgcagctttacaatgctgtctatcacatggtttctgtattcatccagatgttttagttgctatgctataaactacacaattccacttattatttttcaattaaaaataataaaggttatatcttcatgaaggaaaacaatgagactgataaggtttcaattactaatgtcatcctctggagaagacagaattgataacttatcaagatgtgatggggttttccctaattatcactgatttttttacaaggattaggactacaatccacagttttcatcaaagcacacaaccagaagaggtttttctttctcaatacaagggtctatctacacctcaatactgcagtatgtaatgccccaaaacaaagatttttcttttacacaataatagtcacactcagtagctattgttcaaataataatacagcctaaatttaaattttcacaatttttctagaatatttttatggcttttttctcctgcagtttactatacaggcaaggaacaagcatatagttcatttatgttgaccttttcacctcctgtaatcaaggaaagttcctttcctggtttgtttcttttcaatcagttgacctttttgagaccagcagtcatttaaaatgttcctcaggctggttttstatgactgttttctagaggcagattccagctacaattttggcaagaaaactacataggtgctttaaatatcctgctgaatcacattgatgaggtgggagcatgaaatgtcacatatgtcattattggtcatgctaagttccccacataataaggttgtatcctccagatcttaccattgtaggggttctgctttttatatgcaactagtaaaaatctatgggagtgcattaagattatccgaaactcctgcttccagaatcacacacccaacggttctagctttaattgatgatccttacctgacctgatgatcctgacttgaattgttgcaaagtgataatctttgtaatttcatcatcttttcagtgttttaagctaaaattaatctgtagcatggcagtaataaacacacaatagtttttacttcttattgcacttgtggttgtcatcccagatgacatcatattaaaatagattacatgtttatttacaaaarttctatgaacagatactctggacatttcaagtgtcaacagagacttccattttaaaccataatctacataatcaaaatacaagatgtgtcaaatttgaagtgatgaaatagagcggcaaatgaggccagaaaagggcatccaaacttgatgatctggagaacacattcagaaggttgcacacaagtatccaagatgtaagacttcaaatgtgattggaaagctctttagcaagcttccaccactggccttaagctcatccatgtaaattactgtgtctggctggacctgagtttcctcatctatagatcaacgttatggcgctacgtgatgtccactacttctcctcacttctggacttctttataaatcagattatctgttttgttacttccagggcacaaccataatggcattactgacttccgtgctacatgatgacaragaatttcctaatscaaatatctttgaccctggccactttctagataagaatggcaactttaagaaaagtgactacttcatgcctttctcagcaggtaatagaaactcgtttccatttgtatttaaaggaaagagagaactttttggaattagttggaatttacatggcamctcctctggggctggtagaattgctatttrtccatgatcaagagcaccactctyaacacccatgtgctccaccctcacaatacaccatcattattgggccagatagcggggcttgcaggagttaactctgttgttcccaattgagaaaatgaacatcttggtttgactgaactctgccactagatacatcactaaggcacccaagagctcctcctagaaggtaaaattcatctgatctttccttacctgccttgacaaatgtatctaagtccacaactgcattgagtgtcttctacatggtgtctgtcacctcccaggctgagctccaagggcacaactttcaatgagaacagaggctcactcttgagttagggaagaagagtaaacaggtcattgtaatttagtcagaccaggactgtgagagaggaaagcacaggcccttgggtagcggctagagggggactctgcatgcttcttgctctctcatataacacagtgaggcataaaatggagtaagcaactcagaggatgtttcatgtgcttcaaaggaggtgataaaatttaagggaagctaagaggttacataagctaagaggttattttgcagtgattccagagcaccctgtcttcttccaatcatgatcatatatcctggatacttgcttttcacacctgtgttttgtgtgctaagtctctggccatggaatctccttcctttattctttgatcttttatgtctgctttatatttggcactgtagataccaacatgacaaggacagagaccttccttcaagaattcacattttaccacaatagataaataaatacagaattacgattcctggtaatctgtgctttaatgaaagcatgagtatgctgttgaggaaaaccagagagcataggatttgattacttgaggggattgtaaagagtgtgaagatgaaatgaaattgaacctatgtcctgaatgtagcctaataaagatgtatcttagccaaaatgaacaacaggatatgaaacttgaaacttcatggtgtgttcaagattgatgaagagagtgtatgaccagagctgaraacagattatgtgaaaagtggaaggaaaartcatggaatatcaggcttggaacaggaaacaagaatgtgcatgtatttccataatgacagatggaaactcaaaatggcaaaagagctgttttaatgtgggaataaataaagaaatgactgttatggagctgataatcaatgaatatttgttgaatgaagggtgcctattgagattagatgttagacagatagcaaatatrtctctttttgtacatttgtttgtcccaccatccattaatcaatccatcatgtcatccatccattcatccacatgttcattcatctacccaatcattaatcaattatttactgcatattctgtttgtgcaagtcacaaatgactgtttgtcacagtcacagttaaacacaaggagtaactacttcctttctttgttatcttcaggaaaacgaatttgtgcaggagaaggacttgcccgcatggagctatttttatttctaaccacaattttacagaactttaacctgaaatctgttgatgatttaaagaacctcaatactactgcagttaccaaagggattgtttctctgccaccctcataccagatctgcttcatccctgtctgaagaatgctagcccatctggctgcygatctgctatcacctgcaactctttttttatcaaggacattcccactattatgtcttctctgacctctcatcaaatcttcccattcactcaatatcccataagcatccaaactccattaaggagagttgttcaggtcactgcacaaatatatctgcaattattcatactctgtaacacttgtattaattgctgcatatgctaatacttttctaatgctgactttttaatatgttatcactgtaaaacacagaaaagtgattaatgaatgataatttagatccatttcttttgtgaatgtgctaaataaaaagtgttattaattgctggttcagttctcagactttccctcttttgtgcataatgcaagaaataaagaaaagagagtgccaggaggccaggcttgtcctcataataataagcagatagtgacaaaggagaagagggtgaggaaggtctctggatgtttgtcatctagagttactgaaggtttggctttataacagagaaagtctgtccaagggaagaaacaaccttcagggaaatattgagaaaatcagttcagttgtgtattatttggagataaaatgaggctaattacttcagggccatagaatcaaattaccaatgcatttatgttaagtgtaaaacaagaaatataaattagaaaaataatgtaatctgttgagactttccaaggattttgttcttgtttggagacagaagaataaaacccagaacatatgattagcaatatgaaagtatatattcatacttgactctaagttgaaaacataaagtgaaaaaaattcaaatattattagtgttcacaataataccaaaacagaggcatgaatttagacacttaatctccatttctacttcactgatccactcatctttaaccccataggcgaaaaaatggagcagggacatgagggcactcaagcacaaagcctctataaacagtcagaaccagtacagcaggttcagtggtcctcttatcagaataaagttactgaaatcagtctcttgtccaatgaaagctgtagctatggcttgtggaacagtgggaaggggtgagcatctggtggaggcccgtgcttgtatagttgctagagaaaaattaaaaccttgtgccagttagaacacagtttattctttaagtgtagaggtgaatgacctaactcttgcctgccatgaccttaggtcctatttataagttggtatcttattgccacaaaaagtccaccccatcagtcttacgacctctattttaacactaatgttgatgagttgttttgtgtaaaccacaaaagagagggggtctaaagaggcgtgtctgacctcccatcctctcgtggccaggaatagtttttaaggtttttgctgaggttcccttgtccaagcaggcttaggatttatttttagtttacaataattacaaaatttcaaagaatctacccacagaatacatctaagttacatagttgagaagaacctagttacaatggagaagacagccacaaactatctaaacctagtaatcaaatgacatcattctgatgaaacacattgaaattgtctatcactcaaaaatgaaaagtatcctctgtgatattcctagcagagattcctctgctgaatttagtcatcaaaaaacatcagacaggcctaaattgagggacattttataagtattcagcctatactctcaaagagtggcaatgtcttggaagtcaaataataactgaagaactgctccacactgaagttgatgaaagagacatgacagctagttgtggcatgcgattctggattctgaactaaattatgagagggacaaaaagcatatattttgggacttttggtaaaacaccaacaggaacaagaattagaaagttccagtgcattaacattaattttctgatcctgatggttttactatagttatataagagaagcacaagcacattgttttgagtaaatacatactaaaatacctcaagtatctggaatcaggttagtatttactttcaaaaggttccatgtgaaacaattatttgcatgaacaagcagttcttctatataccagtgattgtttttttaaaaaataaagccaacagtgygcttatgtatgcaaaataaactaggctttcacaaatgaaggatcactgttgacaatgcaaacttgaattgctcagcatcattaagctttatggaaatacaaactaaaacttcaattagatattattatataattcatcagaatggttcaaatgaaaaaaggacacattatgttgtctgttgatgagaaagcgaaacaatcacagtctcatggaaaaattagtaaaatagttcaaccatttggatagtcctttggcagaatttatctaaagtaaatacacgcatatctagcaattgcggttgtaggtatgtactgaacagaaatgcaacaataccttgtgatagcaaaaagacatgtataggaatgtatataatagtgctattcacaatagccccacactggaagcaaggcaaatgtttgaagcaatatcataaaacaattgtaaaatgctcataaagtgaaacactaagaaaaagataacagctatttctgcctgcaacaacttgattgaatgtcacgacacattaaatgaaagtactggacagtaaataagtactattggatgattccattgatataaattcacaaataaataaaactatcattttgtttcttttttaaaaaatgtgtgttttttttctcaagatggcagattagaggctttaacatacctcagccacttggaaatagaaaaatagtatataaagatcaattgtgtgagctttaattcaagaaaaaatgtgggaattcgctgaaatagtgaaacacacttcagatcccaagtgaaggaggtgggaatgcaggccccatgatggtgttcagcttatcaaaatgggtgaagcccccagtatgtgagagggccagagagtctccctctctgaatctcctttctgctagagatccaggccccaaacgctggaactaacttagagagaggctggaaggtgatgaaagggaaagacatcaggaaaatctgcaggtgttttcccagacctggaactgagaagacaatgccattttaaatctgcgctcctgcaaagtcagtcattgtttggtgacctggcagcagcagtcactgcaggcattttagtctcaggccagagactgaagcgcttgctctggagcagggaaagggcacccacagtcagaattgagcagtgagtgtggtgagcaccccaacagtaagcactggagttgagctctctcccatcacaggactggagtggaaggagagttgctgaaatcaaggtttctcttgggcatcacgccttgcagtctgggacagctttatgacctggaactgggctgcctgtgtcattgctggatgcccatcctgctcccttgttcagtcatgagagagtgtcccaccagttctgagaaacaggagacaagcaaaccacactcctgcttacctgtattgggagcctgagccaagctaccctttccttactaagatcttggcaaggtggtaggtgcaccctcccctccattcctggtcatttttccaagcatttggagcacccactcagctggattagcagcctgagcttccccttccttcccatgaagagaccttggtgcagaggcacactctttgctccatgcctacacatatcaccaagctttgggtgtacctgctcactggaataggagcttgagccaccacttcttcccacacaaagaccttagtgcagtagcgcttcctctgctgcacacccagacataactgcaggcattctgcaaacccatcctcaatgattaggagtttgaacagcctctaccttcccatgcaaagaccttgttgtggtgatttctgtgctcattccctagtcatgtcacatgcagcttgaggtgcacatactccccgggattaggagcttgacttgcccctcttatcccctacaaagatgttttggcagcagtagttttttttgctacatccccaggcatatttccaggcatttggtacactgcttccctggataaggatcctgaagtacccttcccttcaggtgaagagatattggtgcagccatggtctctgcttgatggccagaaatatctccaggcacttgaagcacccactattctaaattagaagtttaggccactccacccatgcagaggacttggggcagccaggatttcctgacaatatgagttagcacacctccagatacctgactatggcccactagacctgctttcaaagctgatacttgttcctgacactaggagacctgtaggcaggcctgtctcatctagctccacctgtcttggtcctccatttgagggctaagctgggagctcacacaagtgtgcttgccagtgatcagcccattgcttgaggtaacagagagcttctacaagtaaacaaggatcaagtatatacacatatgcattaaccttagccagctcttacctataagtaccaccagctgttccagagttagaaatgcataacacaatagaaaatctgatgacacaacctcacagcactggggaacaagatatgctttctgagacctccacactatagccccagaggaggaaatgaacctgctcacataccctgtacagcactatttcaaccagcatttgggaaagccattatacaaagcctatttataaccaaggaacttttacaaacactttgccactgaaagcacccagaaacaaagccaaaggaccctaaatagcatacataatacacaccttcttaaatcttttcccattagacaaaaaaagtgcagcttacttccagcatttatttaattttatgtaaacactctctttgaggctgaagcaaaggtgactgattttgaatgtgaaaataaaatataaaaactttccttggagttgtttccaaatagaacttgtctctaatcctaatgtaacaaaaatgtatgtaaagatcagtatttaatagtttttttgtgtggtacatttcaaaacatagaacaacataaagtggaacatcacattccacaaaaatatactgcatttctttctgaatcttcttgtcatccttgtcattgtgtgagcagcaaatgatgcagcaaccagccaattctgtttccctgatgttggtggtatgcttttgaggaaatgtcatctagacaggaaaagtggtatgacatcatcacagcatggagggccttgaagaggttgctgcccttgcttgtgatgcttttccagcattctttctatcaatgtgactctgaagtttgcatgatgaaacatgtgctcaagattgtccttcttgaataggatgtaagagttcagcacagtaatgtttaaaagatggcaaaagaatttcttataccaaacctggtgtgttatctcagggtaaatgctgcagctgcaaggaccaacagagagcgttctcagtgcaaatggggagtgggttaaggggcagaattttttattcaaacaaaagccaattcaaaaaacaagaaggagaaataactcattcaaatgagagggaagcagagaaacaactcgaaaagtatgaaaagatgaagtgttataacacctccaaaggatcgtactaacaaaaataaaatctttgaataccaaataaataatgcaaggtattgattttaaaaagctcagtgaggtccaagagaaagttaaagaccaacacaaataaatcagaaaaacaattcatgatatgaaaaaagagatagatatcatttttaaaaccaaacagaacttctagaaattaaaaaaaaaatcactgaaggattcacaaaatacagttgaaagtttaacaaaagactagaccaagtggaagaatttcagacctggaagacaggtcttttgaattaatccagtcaaacaaaaataaagaggaaagggttttaaaagtgaacaatgcctttgaaaaatatggaattctgtaaagcatccaaaactacaagttactggcattccagagggagaaggaaaaaaactaaaaagtatggaaaacctagtttaggaaaagattcaggaaaagttccctggtcttaggagaaatttgagacattcagattcgtgaggctcagagagattctggaagatttattgcaagaagaacctcactatggcatatagtcatcagactatctaaagtcaacacgaaggaaaaaaatcctacgagcatcaagaaagacacgtttaatcacccataaagaaaatctcgttggagtaatactggacttctcagaag

SEQ ID NO: 95878 - DNA, 62822 bp, Homo sapiens
ataacttggataaaatggatcaattccataaagaaacaatcttctaagtctcacacaagaagaaatagataatttgaataggcctttatttattaaagtaataaaataaaaaataaataacctccaaaagagaaaacaccagacccatataggtccactggtaaattctaccaaacatttatagaagaattatacccgttctctacaatctcttctagaagtagtaccagaggaaattcttctattcttaactcattttatggggccagcattactctaatactcaaatcagacaaggacattgtaagaaagcaaaactatatatcagtatatctaatgaaaataggtgcaaacctcaataaaagattagcaaattgcatccaatcgtgtagaaaaactgtatacaccataactaagtgggatttattttagaaatgcaagagttactcaacatatgaaaatcaaatattttacttcatcacattagttactaaagaagaaaagtctcatcatcatatccacaggtgcagaaaaaaaatttgcctaaatccagcacacattcatgataaaaactctcagcgaactaagaatagaggaggaactttctcaatttaataaagaatatgtgcaaaaaacctaccgctaacatcattattggtgagaaacttgaaattttctggctaataacaagaataaagtgagatgttccatgaaactactcctattcaacatcgtactagaaaccctttttaatgagataacaagaaaaagaaataaaagtgataccaatcaggaataaagaaataaaactattgtgtttagatcgcatgattgtttatgtagaaaatctcaaagaatcaaaaaacctccaaaaataaaaaaaacaaaacaaaacaaaaagaaaacaacaataatgaaaaaactcctaaaagtaataagctattgtagtaaggttgcaggatacaaggaaatcaaattcttttctctatattaacaataaataattagaatttggaattaaaaacatagtatcatttatattagcaccaaaaatatgaaatccctaggtggaagtctgtcaaaatacatatatcacttgaagaaaactacaaaactctgatgaaagaaaacaaagatataaataaatacacaaatatttcatgttcatggatatgaagaccgttgttagtctttttgatttgatctatagatcaacacaataagaatcaaactccaggaaagttttattatttttattattttttatctttagatgctaacaatctgattgtaaagtttatgtggagaggccaaaaaacccagaatagccaacgttaaggagaacaaagtcaaatgactgaccttacccaattcaacttcaagacttactatgaagctaatcaagacagtgtgcaattggtgaaaaaagtcaaatagattaatgcaagtgagtaaagagtctgaagtagatcatcagaaatatagtcaactgatctttgaaaaaaaaggaaagacaattcaatgggggaaaaatggtcttttcaacgaagactaatggagtaactggaggttcacatacggaaaaatgaatctggaaatagaccttacacctttaatgaaagttaactaaaaatatattatagatctaagccgggtgcagtggcttatgccagtattcccagtactttgggaggctgaggtaggcagatcacaggtcaggagatcgagaccatcctggctaacatggtgaaacccccatctctactaaaaatacaaaaaattagctgggcatggtggcacgcacctgtagtcccaggttgtcaagaggctgaggcaggagaatcgcttgaactcaggaggcagaggttgaagtgagccgagttgagagccactgcactccagcctaggtgacagagtgagactcagtctcaggaaaaaaaaaaaaaaaaatatatatatatatatatatatatatatgtgtatatatatatatatatgtgtatatatatatatatatacgtgtgtgtatatatatatatacatatatatattagatccaaatataaaatgcaaaactatgaatctctgatagtataagataggagaaaataaagatgaccttgatcagcaatggtttttaaaatactacaatgaaggtataatccatgaaataaagaatgactaagctggaccttattaaaatttaaacttctactctgcaaaagacactatcaagggaatgagatgaaaagacagagactgggagaaatactttcaaaagatatatctgataaacgacttctctccaaaaatttttaaaactccacaattagaaatcagacaccttgatttaaaaaatgggcaacagatctgaacagacacctcacccaagaagaaatacagatggcaaataaatatatgaaaaatgctcatcattaaacgtcactacggacctgcaaactaaaaccccaatgagatacaactacacacttatacaatggctaaaatccaaaacactgataaaaccaaatgttgacaaggatgtgcagcaatgagaactaagtcattgctggtggaaatgcaaaatgataaagacacttcaggagacagatgggcagtgcctaaaaaaactaaaatatgtttaccacattatctggtagttgtgctctttggtatttgccaaataagttgaaaatacatttccacacaaaaatctgcacatggatatttatagcagctttattcatcattgtcaaaaattagaaatcaccaagatgttcttcaatagataaatgaatagacaacgtgataaacctatacaatgaatgttatttagtgttaacaaggaatgaactatcaagccatgaaaagacatgcagaaactttatacatatgagtaagttaaatcttaaaaggctacatactgtatgattccaaccgtattacattttggaaaaggcaaaactatgcctacactgcaaagattatttgttgctagggcttgcaaggaagggagagagaacacgtaaagcacagaggttcttagggcagtaaagctattttatgtgatattacaatggcacatgtcattatgcattagtcaaatcccatagaatgtacaacacaaagaatgaaccctacataaactatgagctttggttgatgatgatgcgtcaatgttggttcattgattgtaactaatgagagttcttgattgtgagagagactgtgtgtgggtgcagggaaagaggcatgtggtaattatatactttccacttagtgttgccagaaaccccaaactgtttcaaaagcctactctaatccaccattctagtcaagctgaggtttgtattactcagtgactgtggagggcttaatgttgatactcccctgatcatttggactgagatgtgaattctatgagatgggatgtgacatgtcactgaattgggagttgaaaaactgggattctaagaaaagtcttggctgggcgttgtggctcatgcctgtaatcccagcactttgggagacctaggtgggtggatcacaaggtcgggagatcaagatcatcctgcccaacatggtgaaaccctgtctgtactaaaaatacaaaaaaattagctgggcgtggtggtgggcacctgtagtcccagctacttgggaggctgaggcaggagaatggcatgaacccaggagctggaaattgcagtgagccgagatcgcaccactgcactccagcctgggtgacagagcgagactctgtctaaaaaaaaaaaaaagaaaagaaaaagtcttatactgaggcattgtgattgtgatactttgtctcactgagtcaataattgctcatttcttaaaaaaaaaaaaagcaaagtttagagtagttgatctcagatatcccttctatctacacattatctataattctttctttctgtaaactgaaaggtctaggaaggagccgcagctcagcaggagagaggaggagctgagctgggacccctacctcctgaggaatgaaatgattattataaagacagcaaccgagcttattttacccaaaataaggtagtatatttctgttagagtttagagtttcatgagtcagggaccaagttattgcttttctttgccctgtataaaggcttctccaaggcctttgacttacctaagtactaaatgttataaaaccaaactcttctgacctctcaatctagtcaactggggctgtaattattaatgaaattaatgtttattttgaaaataatttactagactgaattacgaaatcctgaatcattgtacactatcagtaaatattggtggacccaactgaactgaatgttttgcttgaaatgaaacctttgagatgcagggcttatgggttctagtcccagctctagcactagcagacagcatgttcttggctaagatactgaatcttcaaggctcagcttcctcattccggaaatgggtcaattttattgtaagcagaggtaattgagagattcaaaagggacatgaggtgtaacaattctctgtaaattgttagaatccctgttaaaaatgaccagtaaagctttgtgcaactgtgtcttgacataactttatttttcttaataaaagaaatggaaataacctcactagggaatttagaacaaatatgatgatatctttaaagaaaatggctttgcacaagtattgacattaatgatctagtaaagtgtatctttctagttgtatttagatcctcaactcagtatgtcagctcctgttaaggtctatacattgtggtggttctgtgctgtgggtccatttagtgatttccctacctcccatcttttattgcatccacaactgtggttctgtccataatttcctttgctttctgtgcattattacatcatatctgaaaatgagaaaccaaaaacaatagaaagcagccatgtctggaggtgactggggggtcgagaagccctagtttctcaaacccttagcaccaaatttttccctcagttacactgagcgtttcacttctgcagtgatggagaagggagatcccttatttcttctcatgagcatctctggtgctgtttcccttagagacaaataaggggttctatttaatgtgaagcctgttttatgaacagaataaatgtggtgtatattcagaataactaatgtttggaagtttgttttattttgctaaaattgttctcaaggcagctctggtgtaagagataatacaccacgatgggcatcagaagacctcagctcaaatcccagttctgccagctatgagctgtgtggcaccaacaggtgtcctgttctcccagggtctcccttttcccatttgaaaaataaaaaataacaattcctgccttcaggaattttttttagggggtttaatggtaaaggtgtttatatctgctaaggtaatttacttgatatatgtttggttatttaagatatatgagttatgttagctatttcatgtttaggctgctgtatttttagtaggctatattaaatatttgaaaggatttcattataaagaacaaagtctcctaatctttgatatagcattgacatactttttaaatatacaaggcatagaatatggccatttctgttaaatcatatattcccaactggttattaatctaagaattcagaattttgagtaattgcttttgcatcagattatttacttcagtgctctcaattatgatggtgcattagaaccatctgggttaacatttgttttttattaccaatacctaggctccaaccaagtacagtgaaactggaatgtacagagtggacaatggaacgaaggagaacaagaccaaaggacattttatttttatctgtatcagtgggtcaaagtcctttcagaaggagcatatagtggacctaggtgattggtcaatttatccatcaaagaggcacacaccgaattagcatggagtgttataaaaggcttggagtgcaagctcatggttgtcttaacaagaagagaaggcttcaatggattctcttgtggtccttgtgctctgtctctcatgtttgcttctcctttcactctggagacagagctctgggagaggaaaactccctcctggccccactcctctcccagtgattggaaatatcctacagataggtattaaggacatcagcaaatccttaaccaatgtaagtatgctccttcagtggcttgcaaaaggtaagtaaattcacctgtattttttaaataaagtgtatccctagaggtacaygttacaagaggtaatggtaaagtaaaatactttgaaaggcttttgttgccttttccagtctgtcagtgtcagaaatagtggaatgaaaccatgtattttgtgagtagagaaagatttgggtctttgcatgttagattcaaaataacaagtgtcaatagtttgaaaagctgtgttccttcttcatttcataaccatttgctataatttttggctgaaggtaaatggtaaggtattctgggatctggtcagcagcccacaaagcaactgggctctctcttttttcccaggtggatcggcaggttgagaaataatagacacacaagatagtgaaagctgggtccaggggggtcaccgccttctggtcccatggtgccaagaatgcactggatataccagcatttattattaagtttagtgagggcaggggtaggttagtgagggatttagggtcatttgattatgaggtgagatggtcacatggggatgaagtaattctttaacatarcatttgtatgtagaagtacagtacatttgtatgtagaagtacagtatacggagataagaatttacaatatagtgtgtgcgtcagtaatttctaacagagccttaaaacagaaacacaatctttccataacctatgattagcaagatattaatcagcagtaacaattgcaacaaaagctggttacaaacaatccatggaaataggatgtgaagctagacaaccagttagaccagaaattctcagaagggmgtatgccttaaccctaaagaggcctagaagagccatggcaagatgagggcatttatagccctatcttatccatatggacaggtgccccccatgcgtccatttataggttctccacaaaggtcgcattccattcccagagctatgaacatctgcttttctgggataggaatcttggtgatgtgaaacctctctgactgcacgtccattcataggctctctgcagggggaagcacatcacrcgctgttggctcattctggcagtccagcctggcactgtccttacacaatcctgcatgcaattttgtatttacaataatcgggagcatttcatcttttattccgtagcaatagtttcagggggggtctccctacagtaaggaacatgtttgttattagagattttattaaataagtcctctactatattagccatgtgttttattcagaatagccatgaaaattaaacttctctgaagaattaatttatgcctgttgtaaaggaaataactgtgggttcaggaccagcaaaagcagataagtggtagaaaagaagttatagacttccatttttagatccacaaagtactgttttaattatactatagctacaatatataaaccccaaaatgaccttagcatttagtaatggtaggaagaaggtcagaagatgtataagtattagggttttttctcaagtgaaagatggtttagcagtgttaatatgatatgtgaacacccctcgttgtgtaataattaccatatacagagagtaaagggctgcaattagtatattaagtcttataagcatgatggtatgattagatcaagagaatgacgctgtagttatgaagactactcctactagattgatggtagggggcagggcaaggttggcaagactagctaggagtcatcacatggctatcagggagagaagtgtttgaaggccttgtgttastagtatggtttggctgtgaactcgtttgtagtttgagtttgcaaggcagaataatagggatgaggttagtctgtgggcagttattagggaagttgcactggtaaaacttcagggggtttgaatgagaaaagctaygataacaagtgccatgtggcttatggaaaagtaatgagtgattttagatcagtttggcacagacaaaaggagcttgttatgattatttctcawaaggatagtaagaaggaggaataagctataaactctgttagggggttaagaattaaggtgatttgtataatcctatagccatctaattttaggagtactgctgtgaggactattgacctggcaattgcggcctctatgtgggcttttgggagtcctaggtggagtccatagagagatatttttagtataaatgctatgatgcatgctaatcataaaaggctattaaaccaggaaattgttagttcttgaagctgggtattggtcttaaggtagactcgaaagtgctgataaatttctcaagcatcagtgtttgaataagcggagtttcaaattttggtctgctgtacattagctgtgagacactgaaaatgaatttgtcattctctgagctcagttttttttttttttttttttttttttgagacagagtcttactctgtagctcakgctggagtgcagtggtacaatcttggctcactgcaacctccatctcccaggtccccattcaagaaattctcctgcctcagtcccccaagtagctagcattacaggcatgcaccaccatgctcagctaatttttgtatttttagtagagacgtggtatcaccttgttggccaggctggtcttgaactcctgaccttgtgatccacctgccttggcctcccaaagtgttgggattacaggcaggagccaccacacctggccgtttgtttaaaatagagtaaatagacctgctgaatatgttgatgtgagtattaattgtaatctgcatagcaattgtctgaccattgccttgaacatcacaggccatctgagtggcaagtataatcatcatcatgtttctatttaaaattcagaaatatttgaagcctgtgtggctgaataaaagcatacaaatacaatgaaaatatcatgctaaatcaggcttagcaaatggacaaaatagtaacttcgtttgctgttatctctgtctactttcctagctctcaaaggtctatggccctgtgttcactctgtattttggcctgaaacccatagtggtgctgcatggatatgaagcagtgaaggaagccctgattgatcttggagaggagttttctggaagaggcattttcccactggctgaaagagctaacagaggatttggtaggtgtgcatgtgcctgtttcagcatctgtcttggggatggggaggatggaaaacagagacttacagagcycctcgggcagagcttggcccatccacatggctgcccagtgtcagcttcctctttcttgcctgggatctccctcctagtttcgtttctcwtcctgttaggaattgttttcagcaatggaaagaaatggaaggagatccrgcgtttctccctcatgacgctgcggaattttgggatggggaagaggagcattgaggacygtgttcaagaggaagcccrctgccttgtggaggagttgagaaaaaccaagggtgggtgaccctactccatatcactgaccttactggactactatcttctctactgacattcttggaaacatttcaggggtggccatatctttcattatgagtcctggttgttagctcatgtgaagcgggggtttgaagctgagagccaagggaatttgcacatatttgtgctgtgtgtgtacaggcatgattgtgcrtacagtgtgggtataaaaggttcatttaatcccatgttctcytgaactttgcttttttgctttcaaataagaaatgatgaatatagattttgagttcattttttgaaagagttaaagagcagtgtttttcccattacctattccagaacatgtcaccagagaatacttgacaagtcaacatggtgggaatggccctatcatacccatatggagcatgaaccaaatggcatgtgcttttatttaattggactgtgtttgtatggtcagcctcactgacttctctggggtttcttttaggcccgtgcttgccattctggccagtaatgacattctacagtttttattgcttaggcatatcttagtgcagttctcatcaattattatttctctgtaaacacagcattattttaaaaatagtattaattatttcttgttactgtattgatttatatattttcagtaaatacatcctgtagcataattctgtgaaatacccaaatgtcaatttataaaatgatttatttaacaagattttacttattagtaataactctgtaatctgcattccctatgtatgatttggctctgtttcagttttgcttatctctttccaaccatatttatgaaattttggcttagaaatttatgttaattattttttttccatggccaactctactcatctatgaagttttacaatgaatctgtttatcagcttggataccaaattaccttgtttttaaattctgttttcccaatgaagttaaagactgaaaatcagatttatctgtgaatgacacacacaaactaacagatttccaactgttcaatgcctggccattcattcagagtacttttgattaaagtcactatttagggcctatagatatcaggggaaattcagcccctgatatttcaatgtgartccttttctattctccctaagtgttggctggtctgagaaataaagggaaagagtacaaaagagagaaattttaaagctgggtgtccaggggagacatcacatgtcggcaggttccgtgatgccccctaaaccacaaaaccagcaagttttcattagtgattttcaaaagcggaaggaatgtgtgaatagggtgtgagtcacagagatcacatgcttcacaaggtaataaaatatcacaaggcaaatggaggcagggtgagatcacaggacmggagtgaaattaaaattgctaatgaagtttcaggcactcattgtcattgataacatctcatcaggagacagggtttgagagaagacaaccagtctgaccaaaatttattaggcaggaatttcctcttcctaataagcctgggagcactatgggagaccaggccttatttcatcccttatctacaactgtaaaagacagacgttctcaaaacagccattttagagaccaccccttgggaatgcattcttctcagggatgttccttgctgagaaaaagaattcagtgatatttctcctacttgcttttgaaagaagtgaaatatggctctgttctgctcagcccacaggcagccagacttcaaggttatctcacttgttccctgaacatcgctgttatcctgttttttttttcaaggtgcagatttcatattgtttaaacaatttgtgcagttaacacaatcatcacagggtcctgaggtgacattcgtcctcagcttaggaagatgatggtattaagagattaaagtaaagacaggcataggaaatcacaagagtattgattggggaagtggtaagtgtccatgaaattttcacaatttatgttcagagattgcagtaaagacaggtgtaagaaattataaaagaatgaatttggggaactaataaatgtctgtgaaatcttcacaatttatcttcttctgccatggcttcagctggtccctccgttcggggtccctgacttcctgaaacatatagatgtgaatttgggagctctttaactataaagtttaatatctcaaaataataagagctatttatgacaaacccatagccaatatcatattgaatgggcaaaagctggaagcattccctttgaaaaccagcacaagacaaggatgccctctctcaccactcttattcaacatagtattggaagtcctggccagagcaatcagtcaagggggtattcaaatgggaagagaagaagtcaaattgtctctgtttgcaggtgacatgactgtatacttagaaaccccatcatctcagccccaaaactgtttaagctgataagcaatttcagcaagrcctcaggatacaaaatcaatgtgcaaaaataacaagcattcctataaaccaataatagacaagcagagagccaaatcatgagtggactcccattcacaattgctacaaagggaataaaatgcctacttacacaacttacaagcgatgtgaaggacctcttcaaggagaactacaaaccacttctcaaggaaataagaggtgacacaaatggaaaaaaattccgtgctcatgaatagaaagaatcaatactgtgaaaatagccatactgcccaaagtaattcatagattcaatgctatacccgtcaaactatcattgactttcttcacagaactagaaaagaataatttaaatttcatatgaagcaaaaaaagagcctgtatagccaagacaatcctaagcaaaaacaaagctggaggcatcattctacctgacttcaaacaatactacaaggctacagtaaccaaacagcatggtactgggaaaactggctagccatatgcagaaaacagaaactggaccctttccttacaccttatacaaaaattaactcaagatggattaaacacttaaacataaaaccaaaaaccataaaaaccccagaagaaaacctaggcaataccattcaggacataggcatgggccaagwgtttgtgactaaaacacaaaaagcaatggcaacaaaagccaaaattgacaaatgggatctaattaaactacagtgcttctgcacagccaaagaaactgcatcagagtcaacaggcaacctacagaatgggagaaattttttgcaatctatccatctgacaaagggctaatatccagaatccacaaagaacttaaatttacaagaaaaaaagaaatatccccatcaaaaatggacaaaggatatgaacagatgcttctcaaaagaagacatttatgcagccaacaaacatatggaaaaaagcttatcaacactggtcattagagaatgcaaatcaaaactacaatgagataccatctcatgtcagttagaatggtgatccttactaagtcaggaaacaacaggtgttggtgagaatgttgagaaatatgaaccctcttacactgttggtaggagtgtaaattagttcaaccattgtggaagacagtgtggtgattccttaaggatctagaactagaaattccacttgactcagcaatcccattactgggtatatgcccaaaggattataaaccattctactataatgacacacgcccatgtatgtttatgtggcaccgttcacaatagcaaagacttggaaccaacccaaatgcccatcaatgatgtactggataaagaaaatgtggcacatatacaccatggaatactacrcagccataaaaaaggatgagttcatgtcctttgcaggaacatggatgaagctggaaatcatcatcctcagcaactaacacaggaacagaaaaccaaactccacatgtttgcactcataaatgggagttgaacaatgagaacacatggacacagggaggggaacatcacacatgggacctgttggggcacggggggccagcagggggacagcattaggacaaatacctaatgcgtgtggggcttaaaacctagatgacaggttcataggtgcagcaaaccaccatggcacatgtatacctctgtaacaaacctgcacgctctgcacatgtatcctggaacttaaagtaaaataaaagaaaatttaaaaaatataaagtttatcgatcacttgattataacaacttcatttcagagatcctccaccaaacaagaaaacttttcctataatttaattcatttagctattaaatgatasgctgggcctaatcaatatcaaattaaataggttaaatttgcaggatgattagagatgagggcatttagttcctaaagaagaaaattcattttaaaaaaggtacagaagaaaaaaactccacttatcaatttacactttcttgtttgccttacctgggatttatatttaaaataaaagtttttggccaggcgcggtggctcatgcctgtaatcccacaactttgggaggccaaggctggtggatcatctgaggttgggagttcgagaccagcctgaccaacatggaggaacctgtctctactaaatatacaaaattagctggatgtggtggcacatgcctgtaatcccagctacctgggaagctcaggtggagaatcacttgaacctaggaagcagaggttgtggtgagctgagatcgtgccattacactccagcccaggcaacaagagtgaaactccatctcaaaacaaacaaataaacaaaaaacaacaacaacaaaaaacaacaacaaagttttcatttaattttttaacaaactaatctatgttaatttgatattagtttgttaacataacaaactaataatatgttaggcatattattcatttatatttgttttccttctcataaaacacattctgctcttacatttattttcttaaatacatgaattcaccaacagtctctttggttcctctctactggttcaacacatgactctttcagctattcattatatataaaaagctttgaaatctccaactattcttgccctttccatctcagtgccttgytgtctactgactttgcagactgatgtgattccctctgaaacatgaattattaggtttttagaaaatgcctttttgttctttccaaagtaaaagacaaataggctgggaatgtaaatttagcatttgaacaaccattatttaaccagctaggttgtaatggtcaactcaggattaatgtaaaagtgaagtgttgattttaygcatgccgaactcttttttgctgttaagggaatttgtaggtaagataatttctaaactactattatctsttaacaaatacagtgttttatatctaaagtttaatagtattttaaattgtttctaattatttagcctcaccctgtgatcccactttcatcctgggctgtgctccctgcaatgtgatctgctccattattttccataaacgttttgattataaagatcagcaatttcttaacttaatggaaaagttgaatgaaaacatcaagattktgagcagcccctggatccaggtaaggccaagatttttgcttcctgagaaaccacttattctcttttttttctgacaaatccaaaattctacatggatcaagctctgaagtgcatttttgaatactacagtcttgcccagacagccttggggtgaatatctgggaaagacggccaagccctttattttatgcatgggaaataaatgcctcaatataggcctgatttctaagcccattagctccctcatcaatgttttttctgctaaactccaaagccctgtttctgtaaagtactttgttgacagccctaaagcgtgctcatagcactccatggatatccaggcactttggaggctcccattactcacaagacttgtccttcaattaacactttgtcgtattatgtggcagaaatatcctaatttaaaagacattatctccttctagtagggagaatatttgggaccatagaagctgccaagaaacactgaatagggcaggggtgtttgatatctcagttgggatcctagctgatgagatagctgggttargaatgacaaaattattggttttatggtgtatgaaccataaacagacatcacacttataccctgtgctgagctggcatgttttattctctgcctaaataataattgtgtgattttatagaagtcatttaactgctctggtgcacagttggaatttgaagtatctttgagcccctcccacttctaaaatactaattccatttcagaggctgcttgatagaaatcaatatagtagggactagctttgtactatcaatcaggttgtccaaattcttttaacctatgctgtcatctacaaaacgtgaatgtagtaattcatgccatcttatatttcaagattatagagaagaattgtaaaaagtaacagaattaacataaagatgcttttatactataaaaaggaggtctgagtctaggaaatgattatcatctggttagaattgatcctctggtcagaattttctttctcaaatcttttataatcagagaattactacatatgtacaataaaaatttccccatcaagatatacaatatattttatttatatttatagctgtaatttacaaccagagcttggtatatggtatgtatgcttttattaaaatcttttaatttaataaattattgttttctcttagatctgcaataatttttctcctatcattgattacttcccgggaactcacaacaaattacttaaaaacgttgcttttatgaaaagttatattttggaaaaagtaaaagaacrccaagaatcaatggacatgaacaaccctcaggactttattgattgcttcctgatgaaaatggagaaggtaaaatgtaaacaaaagcttagttatgtgactgcttgtgaatttgtgatttgttgactagttctgtgtttactaaggatgtttaactggtcaatcagtaatgcttgagaagcactttaagtttttattgtatgaatgaataacaaaatagaccactagctagactaataaagaagaaaaaagagaagaatcaaatagacacaataaaaatgataaaggggagatcaccactgagcccacagaaatataaactaccatcagagaatagtataaacacctctatgctaataaactagaaaatctagaagaaatggataaattcatggacacatacactctcccaagactaaacaaggaagaagtcaaatccctgaatagaccaataacaagttctgaagttgaggcggtagttaatagcctaacaaccaaaaaaagtccaggaccagatggattcacagccaaattctaccaggggcacaaagaggagctgacactattccttctgaaactattccaaataatagaaaaagagggactcctccttaactcattttatgaggctagcatcatcctgatacccaaaccgggcagagacataacagaaaaagaacatttcaggccaatatccctgatgaacaccaatgcaaaaatccacaacaaaatactgccaaaccaaatccagcagcacatcaaaaagcttatccaccatgatcaagtagccttcatccctgagatgcaaggctgtttcaatatttgcaaatcaataaatgtaatccatcacataaaaagaaccaatgacaaaaaccacatgattgtctcaatagatgcagaaaaggcctttgataaagttcaatacccttcatgctaagaattctcaataaactaagtaatgatggaacatatctcaaaatagtaagagctgtttatgacaaacccacagccaatatcatactgaatgggcagaagctggaaggattccctttgaaaaccagcacaagacaaggatgccctctctcaccactcctattcaacatagtattggaagctctggccagggcagtcaggcaagagaaagaaatgaagtattgaaataggaagagagaaagtcaaactgtctctattcgcagatgacatgattgtatatttagaaaacccctttgtctcagcccaaaatctcaagttgataagcaacttcagtatagtctcaggttataaaatcaatgtgcaaaaatcacaaccatttctatacaccaataatagacagacagccaaataatgagtgaactcccactcacaattgctacaaagagaatataatacctaggacacaaacaaatggaaaaacattccatgctcatggataggaagaatcaatatcatgaaaatggccactgcccaaagtaatttatagattcaattctatccccatcaagctatcattgcctttcttcacagaactagaaaaatctactttacattttatatggaacgaaagaagagcccacatagccaagaaaatctaagcaaaaagaacaaaaagttcataatcactgggacattggagaaatgcaaatcaaagtcccaatgaggtaccatctcatgccagttagaatggtgatcattaaaaagtcaggaaacaacagatgctggagaagatgtggagaaataggaatgcttttacachgttagtgggagtgtaaattagttcaaccattatggaagacagtgtgctgattcctcaaggatctggaacaagaaataccatttgacccagtaatcctgttactgggtatatacccaaaggattataaatcattctactataaagacacatgtgcacgtatgtttattgcagtactattcacaatagcaaagacttgggaccaacccaaatgctgatgaatgacagtctggataaagaaaatgtggcacatatacaccatggaatacagtgctgccataaaaaaggatgagttcatgtcctctgcagggatatgggtgaagctggaaaccatcatcctcagcaaactaacacaggaacagaaaaccaaacattgtatgttctaactcattaatgggagttgaacaatgagaacacatggacacatggaggggaacatcaacaccggggcctgtcagggggtgggggacttggggagggatagcattagaagaaatacctaatgtggatgacaggttgatgggtgcagcaaaccaccatggcgcgtgtatacctacgtaaaaaacctgcatgttctgcacatgtatcccagaacttaaagtataaatatataaatctacccaaggagaaacagaatgcacattccaggtgaaatggaatcaattactgacaaatatgaaaacataaaatatgccctgtgatgaagatgggtgtcattattgcacacagtttatttgagaatgggaaagaatgacttaacctaggtgggtttcctgcattcctgcaaattgaaataggccataaaatatttgcagtgagagtcagaggaggggtttcagataggttggaatgctctacatggaggtgcagaggtgggtgatgggaaagagtaggtggatggaagagggaaaggaagcctttattgagtgagaacaaaaatgatttgtacagataacagttggaatttagtgtctatcagataaggcgtaaacatcaatgccgttgtcatcgcaccattgttgaaaacgctattttttcccctattgaattgccttggcaaccttgtcaaaatccaattgactataaatgtgtgaaaggtttttttctgtgtgctctcaattgtactccattgatctatatgtctgtcgtaatccctatagtacaccatcttaattactgtagtattgtattaatatcaagttattatatcaaatcaaggagtgtgagtctttgttgttctttttcaatacgttttcactattctgggtcccttgaatcttcatatgaaatttagaatacacttgtcaattttctcaaaggagccaatggggattttgacacgattgcattaaatcagtagatcagggaattatgccatttttaaaattgaagtgaaattcacacaatatacaattaaccaytttaaagtgtagacttgagtggtatttagtgtattcacaatgttgtacaaccaccagctttctctggtttcaaaatgtttttattacttcacaaaaacatatcatattcattaaataatcactccattcctccaacccatcatgtaattacctctaatcttctttctgtttctatggatttgcctgttatggatatataaaggactcacagcatatgtaacctgttatgtctgagtcctttcacttataatgttttrgaggctcatctaagttgcaacatgtatcagtacttcattcttttttgtcgctgaaatatattttatttttccatgcacatatatcacaatttgttattcatctgtttatggacatttgcattgtttccaacctttggctcttatagatdatcttgctttgatcatttgtgtatgtttctttatgggcatattttcatcattcttgggtatattctcaggagttgaattgctgggtcaaatggtaattttatgcttatcttcttgtatataagagccaatcttttctacagtgaatgtggcattttatattccttccagcaatgtagaaggatttctattttccacatagttgctaatacttgtaactttctgtatttattgaagccatcctagtgaatatagagtgttatctcattgtggttttatttatttattcatttatttagagacagagtcttactctgtcacccaggctggagtgcagtggcatgatctcagytccctgcaacttccacctcctgggtttacacaatcctcctgcctcagcccccagagtagctgggattacaggcatgtgtcaccatacctggttaattgttatatttttggtagagacgggttttctccactttggccaggctggtctcgaactcttgacctcaggtgatctgcccatcttggcctccctaagtgctgggattacaggtgtgagccactgcgcccagctctcattgtggttttaacttgtgtttaatggccaatgattttgaacttcttttaatatattattacccatttgtatatcttctttggataaatgccattcaagtacattttctgtttaaattaagttgactttatttttctttttaagctgttagaatgatttatgtattcaaaacattaaactcctacatatacataatatgaagatatttcctcccattctgttggttgtcatttcacattctcaattatattcttgctgcacaaagtttaattttgatgaagtttggtttatctatctttccttttgccactctggtatcaaatttataaatctattgccaaatatgaagtcatgaagatttacccctacattttattctaagagttttatcgttttagctcttatatttaagtttttccatccattttcagttatatttttcatttggagygaagtaagggagatctcagcttcattcttctgcatttcgctgtcctgttgtctcatcaccatttgttgaagagactctttcctcagattgaatggtctaggcacccttgatgaaagtaaatttgccatagatctttaggtttatttcgtgatttcagttttattccatttgtcttgatrtctatctttatgctagtaccacactgttttgattattacagtttgtagtaagtttgaagttggaaactgagtactcactgatacagaaattaagtagaaattacttaggcaaatagtaagcatttgggagtcctcagtaaggtttttctttatactggaaagcagccccaaatcattttctaacaaagagcagcttgtaaaatcgagctgcagacatacacaaggaagctggaaacttgcacgagtgaaagctggtagtaaagaactacctgtgaccaggcaagttcaaaatggcggctccttccccacccactatgtaaatgtcacacctgattaaaccaatctctgggccatacgtaaatcagacactgcttcctccagcctccctatgcaatctgctgtggtccacctccttcccccttttccgatgtccctctctttcacaagaagctgcttttttctctcctttcttctattaaactttctgctacataacccactcagatgtgtccgtgtcctaaatttttctggggcatgatgacaaacctgagggtgtatatcccagacaacgtagctgcttcatcaccatgtagttgcatattaattgaacaatcaactttcccatttctggaaaaaagaccattggtattgtggtagggattgcctgagtttttagatcactttgaggagtactgccatcttaacgatattaagtcttccaatccctgaacatgagatagttttcaatttatgtaggtattagatattcttttttcttctgttgcaagggtctggtttagtttaaaaggcaagtttatcttaaatttttttatttagttatgaccattgaggattttaaaatgataccatatgaaatgccttcttttaaaaaaaatttcaacttttatttatttatttatttatttatttttattatactttaagttttagggtacatgtgcactatgtgcaggtctgttacatatgtatacatgtgtcatgttggtgtgctgcatccatgaactcgtcatttacattaggtatatctcctaatgctatccctccccactctgccaccccacaacaggccccagtgtgatgttccccttcctgtgaccatgtgttctcattgttcaattcccacctatgagtgagaacatgcggtgtttggttttttgtccttgagatagtttgctgagagtgatggtttccagcttcatccatgtccctacaaaggacatgaactcatcattttttatggctgcatagtattccatggtgtatatgtgccacattttcttaatccagtctatcattgttggacatttggcttggttccaagtcgttgctattgtgaatagtgccacaataaacatatgtgtgcatgtgtctttacagcagcatggtttataatcctttgggtatatacccagtaatgggatggctgggtcaaatgrtatttctagttctagatccctgaggaatcaccacaccgacttccacaatggttgaactagtttacagtcccaccaacagtgtaaaagtgttcctatttctccacatcctctccagcaccttttgtttcctgactttttaatgatcgccattctaactggtgtgagatggtatctcattgtggttttgatttgcatttctctgatggccagtgatgatgagcattttttcatgtgttttttggctgcataaatgtcttcttttgagcagtgtctgttcatatcttttgcccactttttgatggggttgtttgttttttatcttgtaaatttgtttgagttctctgtagatcctggatattagccctttgtcagacaagagggttgcaaaaattttctcccattctgtaggttgcttgttcactctgatggtagtttcttttgctgtgcagaagcyctttagtttaactagatcccatttgtcattttggcttttgttgccattgcttttggtgtatgagacaagaagtccttgcccatgcctatgtcctgaatagtattgcctaggttttcttctagggtttttatggttttaagtctaacatgtaagtcttgaatccatcttgaattaatttttgtataaggtgtaaggaagggatccagtttcagctttctacatatggctagccagttttcccagcaccacttattaaatagtgaatcctttccccatttcttgtttttgtcaggtttgtcaaagatcagatagttgtagatatgtggccttatttctgagggctctgttctgttccattggtctacatctctgttttggtaccagtaccatgctgttttggttactgtagccttctagtatagtttgaagtcaggtagctttgttcttttggcttaggattgacttgacaatgcgggctcttttttggttccatatgaactttaaagtagttttttccaaatctgtgaagaaagtcattggtagcttgatggggatggtattgaatctataaattaccttgggcagtatggccattttcacgatattgattcttcctacccatgagcatggaatgttcttccatttgtttgtatcctcttttatttcattgaacagtggtctctagttgtccttgaagaggtccttcacatcccttgtaagttggrttcctaggtattttattctctttgaagcaattatgaatgggagttcactcatgatttggctctctgtttgtctgttattggtgtataagaatgcttgtgatttttgcacattgattttgtatcctgagactttgctgaagttgcttatcagcttaaggagattttgggctgagatgatggggttttctagatatacaatcatgtcatctgcaaacagggacaatttgacttcctcttttccttattgaataccctttatttctttctcttgcctgactgccctggccagaacttccaacactgtgttgaataggagtggtgagagagggcatccctgacttgtgccagttttcaaagggattacttccagtttttgtccattcagtatgatattggctgtgggtttgtcataaatagatcttattattttgagatacgtcccatcaatacctaatttattgagagtttttagcatgaagagctgttgaattttctcaaaggccttttctgtatctattgagataatcatgtggttcttgtcattgattctgtttatatgctggattacatttattgatttgcctatgttgtaccagccttgcatcccagggatgaagcccacttgatcatggtggataagctttttgatgtgctgctggattcggtttgccagtattttattgaggatttttgcattgatgttcatcagggatattggtctaaaattctctttttttgttgtgtctctgccyggctttggtatcaggatgatgctggcctcataaaatgagttagggaggattccctttttctattgattggaatagtttcagaaggaatggtaccagctcctccttgtacctctggtagaattcggctgtgaatccgtgtggttctggactttttttggttggtaagctattaattattgcctcaatttcagagcctgttattggtctattcagagattcaacttcttccttgtttaatcttgggagagtgtatttgtcgaggaatttatccatttcttccagattttctagtttatttttgtacaggtgtttatagtattctctgatggyagtttgtatttctgtgggatcggtgatgatatccccttcatcattttttattgcgtgtgttggattcttctctcttttattctttattagtcttgctaacagtctaccaattttgttgatcttttaaaaaacctgctcctaaattcattgattttttgaagggttttttgtttccatgtaattgagtttccattgtttccatggaatgcaaaaattccatgttttgagtgagtttcttaatcctgagttctagtttgattgtgctatggtctgagagacagcttgttataatttctgttcttttacatttgctgaggtgtgctttacttccaactatgtggtcaattttggaataggtgtggtgtggcgaaaagaatgtatattctgttgatttggggtggagacttctgcagatgtctattaggtctgcttggtgcagaactgagttcaattcctggatatccttgttaactttctctctcgttgatctgtctaatgttgacagtggggtgttaatgtctcccattattattgtgtgggagtctaagtctctttgtaggtctctaagcacttgctttattaatctgggtgctccgttattgggtgcatatatatttaggatagttagctgttcttgttgaattgatccctttacctttatgtaatggccttctttgtcccttttgttctttgttggtttaaagtctgttttatcatagagtaggattgcaacctctgcctttttttgttttccatttgcttggtagatctttctccatccctttattgtgagcctatgtgagtctctgcatgtgagatgggttttctgtgtacagcacaccgatgggtcttgactctttatccaatttgccactctgtgtcttttaattggagcatttaacccatttacatttaacattaatattgttatgtgtgaatttggtcctgtcattattatgttagctggttattttgctcattagttgatgcagtttcttcctagccttgatgatcttacaatttggcatgcttttgccatgggtggtaccagttgttcctttccatgtttaatgcttccttcaggagctcttttagggcaggtctggtggtgacaaaatctctcagcatttgcttgtgggtaaaggattttgtttctccttcacttatgaagcttagtttggctggatatgaaattctgggttgaaaattcttttctttaagaatgttgaatattggcccccactctcttctggcttgtagagtttctgccgagagatcagctgttaatctgatcggcttccctttgtgggtaaccyggcctttctctctggctgcccttaacattttttccttcatttcaactttggtgaatctgacaattatgtgtcttggagctgctcttctcgaggagtatctttgtggtgttctctgtatttcctgaatttgaatgttggcctgccttgctagattggggaagttctcctggatagtatcctgcagagtgttttccaacttggttccattctcctcgtcactttcaggtacaccaatcagatgtagatttggtcttttcacataggcccatatttcttggaggctgtgttcgtttctttttattcttttttctctaaacttctcttctcacttcatttcattcatttcatcttccatcacttataccctttcttccagttgatcaaatcggctatggaggcttatgcattcatcacgtagttcttgtgccatgattttcagctccatcaggtcctttaaggacttctctgcattggttattctagttagccattcatataatcttttttcaaggttttttacttctttgccataggttcaaacttcctcctttagctcagactagtttgattgtctgaagacttctctcaactcatcaaagtcattctccatccaactctgttccattgctggtgaggagctgtgttcctttggaggaggagaggcactctgatttttagaatgttcagtttttctgctgttttttccctgtctttgtggtttcatctgcctttggtctttgatgatggtgacatacagatgggattttggtgtggatgtcctttctgtttgttagctttccttctaacagtcaggaccctcagctgcagtctgttggagtttgccagaggtccactgcagaccttgtttgcctgggtatcagcagcggaggctgcagaacagcggatattggtgaacagcaaatgttgctgcctgatcgttcctctggaagttttgtctcagaagagtacccagccttgtgaggtgtcagtctgcccctaatggggggtgcctcccagttaggctacaaggggrtcagggacccacttgaggaggcagtctgtccattctcaggtctcaagctttgtgctgggagaaccactattctctccaaagctgtcagactgggacaattaagtctgcagaattttctgctgccttttgtttggctataccctgaccccagaggtggagtctacagaggcaggcaggcctccttgagctgcggtgggctccaccyggttcgagcttcccagccrctttgtttacctactcaagctttggcaatggggggcacccctcacccagcctcgctgctgccttgctgtttgatctcagactgctgtgttaggaatgagtgagcctcagtgggcataagrccctctgagccaggcacgggatataatctcctggtttgccatttgctaagaccatcagaaaagcacagtattagggtggaagtgaccttattttccagatgccttctgtccttggctaagaaagggaattctctgaccccttgcacttcccaggtgaggtgattcctcaccctgcttcagctcaggctccatgcactgcacccactgtcctgtacccactgtctcacaatccccagtgagatgaacccagtacctcagttggaaatgcaaaaatcattcatcttctgcatcrctcatgctgggagctgtagactggagctgttcctattcagccatcttggctccaaatgttctcaacttttattttgaagtgcacgttcatgtgtcttacataggtatattgtgtgatgctgaagtttagggtacaaataatgccatcacacaggtagtgagactagtacccaataggtagtttttcagcccttgcctttatatctctctaccctctatagtaattccttgtgtattttttccatctttgtgtcccacttttatatgagaacatgtggtatttggatttctgttgctgcattaattccctcaagataatggcttccagctacatctatgttgctgcaaagacatgattttttttaatggctgcatagcatttcatggtgtatatacaccacattttgtttatgtgacacatgattggttggttctatgtctttactattgtgaatagtgcaggaatggacatactagcacgtgtcgttttggtagaacaatttgttttcctctgggtamatactcagtagtggaattgctgcatcgaatggtagttctgcttttagttctttgagaaatctcaaaactggtttccatagtggctgaactaacttacattcccaccagtagtatataagtgttctcttttctctgcagtctcaccaacatctgttatttttkggctttttaatcatatccattttgattggcatgagatgatatctcattgtggttttgatttgcatttctctgatgattagtgatgttgagtgttttctcatatgcttgttggccatgtgtgtgtcttctttggaaggacatatgtcctttgcccactttttaatggggttacttgttttttaacttgttgaattgtctaacttccttatagattctcgctattgaaacattgttggattcacagtttgcaaatattttgtcccattctgtaggttgtctgtttattctgttgatagtttctcttgctgtgcagaagctctttaattaggtcccacttgtcaatattcattttggttacaattgcttttgaggagttattcataagttctttgctaaagcctgtatccagaatgttattttatagatatttttccatcagattcttatagtttgaggtcttaaayttagatcattaatccatttcgagttaattattgtatatggttcaaggaagtgtttcagtttcattctgcatatggctagtcagttatcctcattcaatttactaaatagagaattctttcctcattgattattttttgtcaactttgttgaagatcagatggctataggtgtgtggctttatttctggcttctctacttctgttcaatttgtgttttgtaccagttacatgctctcttggttactgtagcttacagtatagtttgaagtcaatgtgaagcttcccactgttctttttgtttaggattgctttggatttgggctcttctttggttccatatgaattttagaataaaataatattggtagtttgataggaatagcattgaatctgtagatagctttgggcagtctagccattttaatgatattgattgtttcaatccataagcmtgaactgtttttccatttgtttgtgtcatctatgattttgttcatcagtattttgtagctctccttgtagagacctttttgccccctttgttagttgtattcctaggttttttcttgtggctattgtaaatgggattgagttcttgattggctttcaggatgaacatttttggtgtttaaaaatgctacagatttttgcatatttattttgtgtactgaaatctcactgaagttgtatgtcagttccaggagtttttggaaagttctttagggttttctaggtctgaattgggtcttctaggtctgagatgggtcttctacttctactagtaggagatgggccttgcaatcttgaagacagtagaaggatgggtcttatttttaatccaacttcctactctttgccttttatgtggagcatttagactttatcttcaatgttaacactgatatatgaggttttgattctattgtgaagttgttagctggttgttttgtagtttctattgtgtgattgctttatagagtctgtgggctatatacttaagtgtgttttgtggtagcaggtattgttctttcacttccatatttagaactcccttaatgatctcttataaggctggtctaatggtaacagattttcctggtagttacttgtttggacaagattgtatttcttccttgattttgaagcatagtttggcaaaatataaaattcttttttgtaatttttattaaaatgaatgttgaaaataggctgagcatccttttagcttgacaaggttctctttgtatgtgatctgatttttttctctagctgcctttaaaattattttttagccttgactttggacagcctggtgagtaaatgccttggtgatgttaattttgtatagtgtctcacatatattccctgggtttattgtatttggatgtctacctttctagcaagtttgggaaaattttctcaacttattagcccaaatgtattttctagattgtttactttttcttctctctcaggaatgccaataattcctaggtttactccttttaaataatcagatatttcttgaagactgttcatttattaaaattattttttctttatttttgtctgacttggttagttcaaaagactggtgttcaagctctgaaattggtccagtctattgataaacgcttcaattgaattctgaaattccttaagtgactctttcaattccagaagctttgattgatttctttttaagatgtttacttctcgctccatttcctggactgctttagtagtttgtttgcattaattttcaaccctgccttggatcactgagcttacttgcagtccatattttgaatagtttrtctgtcatttctgagttgccagtttggttagggttcattgctggggagttcatgtgatcctttggaggttttacgacattcagacatttcatggtgccagaagtcttatgctggtttcttcttatttggagaggctgccgcttctgatttttgaaattatttttgtgcagatagaattgtttttctctccctatttttgttctttcctttttctcttccccttcctatgggatgtgactataaagtatgttgggtagggcctttgacttggattctatagctgtgttcacttctgtgggtagttttatattggcctgtgcagtttgacatacatgtcagtagatggcacttatgagcaaaagccagctgtgactaggacaacttgatatagcacagcttgatccttgttttytgggggaacttctctgtttcctcagataatctgttcatctgtggaattcagagtagtctgggctccctgctgagccccagggggataaagatcggtgtcactggactgggcagtcctgtctacaggtcccctaatggcaggcactagcaccagcactgagagacaactgatttttgcattgatcttgtaccctgaaattatgctgaaatcatttattagctctayttattttctatctgtattgcatgagatttttctatatagagagaatcatgtttcagtcaaatacacatgatttgaatttttcctttcctatttgaatgtgttttatttyatttcttgcctaattgctctggctagaacttccaatactatgtttaatagtagtaaaaatggacatccttgttttttttcttttctttctgattttaagttacaagttttagtctttcacaatttagtatgctttagctttgcagttttcataaatatgctttattatgataaaggagttttatttcatttatagttttctgagtgtttttgttatgatgggtattaaaagttgtcaatttttttttctgcatctaatgagatgaacatgattttctcttttattctgatatggtgtagtgcactgattgactttcttgttgaaccacttttgaatttctgggataaatctcacttgcttattgtgagatttatttttataatgtttattattataattttttaattttgtaaaaaattgttgcaaaatacacataacataaaagtttctgtattaatcattttaagtgcatagtattttggtattaattacattcacattgttgtgcaaatgtcactgccatacatctgtagaattcttttcatcttgcaaaacagaaactttatacccatttaataataactcttggccgggcattgtagatcatgtctgtaatcccagcactttgggaggttgaggtgggcagattggatgagctcaggagttcgagactagcctgggtaacatggcaaaaccctgtctctaccaacaaagcaatcaacaaacaaaatgaaagtaacataatttcctcaactgtgcaaactaattcatattaataattccatgaaatgtgtccatagtaacacaagagcagaagatgggccttgtaaaggtggcccaccacrttatttgaggtctttgtcagtcttatctgccagatactgtgtggactaactgcagttaaaattcccattcccttatcacttgccctgaaatttatctgaaatcaaagggaatgggttgcccaaagagaagtgtccagagacgtggatgatgcgacaagaaatgttgtagaaccacacccccacctcaaatgataactctacatttctcccttccaccaccccatggcaaccaacattctactttgtgtctctataaaatcgagtatgctgggtacctcataaaagtggaatcattacatatttgccttttgtgactggtttatttcacttagcctaatgttatgttctcagggttcattcatgtttttgcatgtgtcagatttttcttcctttctaagggtgaataatattccgttgtatgtataaaccaagtttgcttacccatttatctgttgatgggcacttggattactttcaccttttgactttttgagtaatgctattatgaatatgggtaaaaaaatatctctttgatgtgctgctttcaattcttttgggtataaataacccaaaagaataacccaccacgcctggttaattttttgtatctttagtagaaactgagtttcaccatgttggccaggctggtctcaaactcctgaccctgtgatccacccacctcagcctcccaaagtgctggaattataggtgtgagccacgtcgcccggcctacatttattgatttgcatatgttgaaccaggcttgcatcccagggatgaagccaacttgatcgtrgtggataagctttttgatgtgctgctggattcagtttaccagtattttgttgaggattttcgcatggatgttcatcagggatattggcctgaaattttcttttttttgttttatgtctgccaagttttggtatcaggatgattcttcccttataaaatgagttaggaaagagtgcgtctttttctactgtttggagtagtttcagaaggaatggtaccagctcctctttgtacctctggtagaattcggctgtgaatccttcaggtcctgggctttttttttgcttggtgrgctattccttgctgcctcaatttcagaacttgttattggtctcttcacggattsgacttcttcctggtttggtcttgggagggtgtgtctaggaatttatccatttcttctagattttctagtttatttgcatagaggtgtttatagtattctctgatggtagtttgtattcctgtaggatcagtggtgatatcccctttatcatttttttgttctctctatttgattcttctttcttttcttctttattagtctggctagcagcctattttgttaatcttttcagaaaattagctcctgtattctttgatattttgaagggattttcctgtctctatctccttcaattctgctctgatcttagttattttttgtcttctgctaggttttgaatttgtttgctcttggttttctagttcttttaaatgtgttgttagggtgttgattttagatctttcctgctttctcctctggacatttagtgctataattttccctctaaacactgctttagctgtgtcttagagattctggtacactgtgtccttgttctcattggtttcaaagaacatctttattttgccttcattttgtcatttacccagtagtcattcagagcaggttgttcagtttccatgtagttgtgcagttttgagtgagtttcttaatcctgagttttaatttgatggcactgtggtctaataggttgtttgctttaatttctgttcttttgtatttgctgatgggtgttttacttccaattatgtggtcaattttagaataagtgtgaagtggtgctgagaagaatgcatattctgttgatttagggtggagagttctttagatgtctattatgcccgcttggtccagagcttagttcaagtcctggagatcctagttaaccttctgtctcattgatctgtctaatattgacagtggggtgttaaagcctccatctattattgtgtgggagcctaagcctctttgtaggtctttaagaacttsctttatgaatctgggtgctcctgtattgggtgtgtatctatttaggatagttggctgttctcgttgcattgatccctttaacattatatgataccacccctttttttaatctttgttggtttaaagtgcgttttatcagagactaggattgcaacccctgctttgttttgctttccatttgcttggtaaatattcctccatccctttattttgagcctatgtgtgtcttttcacgtgagatgggtctcctgaatacagcacattgatgggtcttgactctatccaatttgccagtctgtgtcttttaattggggcatttagcctgtttacatttaaggttaatattgtgtgtggatttaatcctgccattatgatgctagctgattattttgccttttagttgatgcagttttttttatagtgttgacggtctttacaaaatttggtatgtttttgcagtggctgttcccagttgatcctttccatatttagtgtttccttcaggagctcttgtaaggcaggcttggtgatgacaaaatccccttgtggtgatgggcttccctttgtggtaacccgacctttctttctggcttcccttaacatttttcctttcttttaaccttggtgaatctgacaattatgtgtcttggggttgcccttcttgaggagtatcattgtgggtgttttctgtatttcctgaatttgaatgttggtctgtcttgctagattgtggaagttctcctggataatatcctgaagaatgttttacaacttggttccattctccccatcactttcaggtacaccaatcaaacgtagatttggtcttttcacatagcgccacatttcttggaggctatgttcatttctttttattcttattttttaacttttttcttcacattttatttcattaagttgaccttgaatctctgatatcctttcttctgctttatcaatttggctattgatatttatttatgcttcacaaagttctcattctgtgttcttcagctccatcaggtcactcatgttcttctctagttagcaattcgtctaacattttttcaaggttcttagcttctttgcaatgggttagaacatgctcctttagctcagtggagtttgttattacacaccttctgaagcctacttctgtcaattcatcaaattctttctctgtccagttttgtccccttgctggcaaggagttgtgatcctttggaggagaagagatgttctggtttttgaaattttcagcctttttgtgctgttttttttttctcatatttgtggatttatctacctcttgtctttgatgttggtgacctttgaatgggttttttgcgtggacatcctttttgttgatgttgatgctattcctttctgtttgctagtttttttcctaacagtcaggcccttctgctgcaggtctgctggagtttgcttgaggtccactccaaaccttgtttgactgggtatcaccagaggaggccacagaacagcaaagattgctgtgtgtttattcctctggaagcttcgtcctagagggacacttgccagatgccagccaaagctcttttgtatgaggtgtctgttgacccctgctgggaggtctgctgttctctttagagccagcaggcaggaacatttaagtctgccgaagctgcacccactgccaccccttcttccaggttctcagtacagtgagatgggagttttatctataagcccctgactgggactgttgcctgtctttcacagatgcaactgctcagagagtaggaatctagaggggcagtatggctacagtggctttgcggagctgaagtggactccacctagtcctagcttcctggaggctttgtttacactgtgaggggaaaaccacctactcaagcctcaacaatggcagactcccctcaacaccccccccaagctcgaacatccccagtcaacttcagactgctgtgctggcaaacagaagttcaagccagtggatcttagcttgctgggctccatgggggtgagatcccctgagctagatctcttggctccctggcttcagtcctctttccaggggactgaatggttctgacttgctggtgttacagcaccactggggcataaaaaaaacccctccagctatcttggtgtctgcccagatgaccacccagttttgtgcttgaaacccagggccctggtggtgtaggctctgaagggaatcttctggtctgtgggttgtgaagaccatggaaaaactgcagtatttgggccagagtgcaccgttcttcacagcacattccctcaaggctttccttggctatgggagggagttcaccaatcccttgggcttccaaggtgagacaacattcctccctgcttcagtttagcctccatgcactgcacctactgtctaaacattcccagtgagatgagccaggtacctcagttggaaatgtagaaatcacctaccttcttcattgatctcgctgggagctgctgactggagcttttcttattcagtcatcttgccagccaccctcctgattgagtttctttaaggtaattattttgaattccttttttgaatatttgtggattttttttcattgaggtctgttatttgagagttattatgtccctttggtggtgccatatttctttatttttcatgttgtgtctctgaatttatgtctatgcatgtgatggaacaattgctattccaaaatctctagagtgaatttcatagagaaagacttttatctgaagttgagtgtttgtgtgcaggtgacgaagagtgggtaactcagtttttgatagatgcattgtgatagtatctgtgtagtttctctagctatggccaatatcagcaataattttgggtgcctcagtggcctaggctgtagaagtttgcagcagtatcaggagcagtgtaggttgttaatgtccttagtgtcaaagtatttgggcgtcctcctatttttattttcctaaaattggggtgacttagcctaagggattccttttggtgtcatctctgacatggcattaactcagcggcattggtgctgggttacaagtacagatccttgaagttgtcatagaagcatcattctagactcagggtcttttaatcatgtattgtgacacctgggtcttgcggtgcaggttcactctctgtggcagtgttgaatgcagattacccacagaaccaaggtctatgactctagcacaccttagcagctgaagcccacagactgagttgtggctgtgaatctgtttctgagggtgaggtgcaggaaaatgccrtggcctgcctctgatgtagaaggggtgctctttagatttgagcccagcaagtagaatatggctactatcattaataagataggatatactaccttattaatgctaagtaaccaagctcaagtcaagagatggaaatgttaatactggtttgtgactgcactgttcttcttacttaagagtaattttcaacatggcaagcttagaaaactgtgtgaagctgatgttaccaagggagaggactgtctttgtctacacatgttgagagaatctagtctatttcagtggtgttgattacacaatattcaacatgacacacatcacttggagactctaaaagcatcattaatttattgctgctggccttggggctggttaaaaagtaatacgttttttatattgatgatctctttcaactaagtattccttatccattgctttctttctcccaacttccaaattatgagaactccagtctctaagccttggcatatgcagtatccttactctctcctttatcccctgtggcaattaatccctttattctccatcttcatcattgttctttctcttcactttgtatatttttgtttattcctgcactactgcaccctagaacaagttgtctgttgcctcccatctagattataatagtgtgggcccatcttgtcattgtaaacccattctcttcctctatratttatcttargttttgctgtcatattgcttttttaatatttgtttttacaaaatttcaactttataatgaatctgggggcaatattgagtccaygtacctttctgacagaaaaatataattgcagactcttgattcaggctcacagtgtctaatgatatggccccaatttaygttttctattaatttagattgtggttgtctacaggtaataatggctttaacacataatgtctttatttatctcaaatacagggattctcttggtggggcaatctaggataatacagcagccccaaagcagcagagagtcaagtgccttcctttttcccactaaatttagtatacagaccttcattttgatgattaaatcccaggatggggtctactctacctcctacttcacatttgtgttttgagtatgaaagaggaaatagaggaaatggacctagagaccttctgcttatatattttagcaaaaaaaaatatgctgtgtgactcagctagctgcaaagagcctgatgaatggaatttttaggcaagcatggaataagggagtaggaaataaagtttgggcaagttggtctacagcctctgctatacaagcagtattttttttctagtactgtactttccagtttctatgttggtaactatataactatgtgartaattttgaattcactgtaatcaaatatgctggtaaataatttgtcagataattgcatcaaatcattcctaggaaaagcacaaccaaccatctgaatttactattgaaagcttggaaaacactgcagttgacttgtttggagctgggacagagacgacaagcacaaccctgagatatgctctccttctcctgctgaagcacccagaggtcacaggtatgatcagagatgataagttaattaattttcagaaaagattttgggaaggtgttgctagtgtcctccttcctgtttctcttagagaagcttcrttatttaaacttttgtgcttccagctgtaatctgtttcaaactaatggtgattacaatgggatatcttggcctggcatggtggctcacacctgtaatcccagcactttgggaggctgaggtgggtggatcacttgaggctaggagttcaagaccagcctggccaacatggccaaatcccatctgtagtaaaaatacaaaacttagccaggcatggtggcacatggctgtaatcccagctactcgaggggctgaggcactggaatcaattgaacccaggtggtggaggttgtagtgagccaagattttgccactatactccagtctgggcaacagagtgagactctgtctcagaaagaaaaaaaaagaaaaaaagaaaaagaaaagataaaaggggcatctttgcacagtagaggaagataactgagagaaatgaagacagcatggcagtagcaaaagcagtagaactctggtccaatgtgtctggatttatggcaggaagagacaagataaattggcctgggattgcatgttggttttattatgagaaggccattttaaatagcaagtatattcttcaagataacttttctcattctcaaaatttcaggttcgaatgctggagtagggaaactkgaaactctccttattgaaggataaatggtaatcctaaaaatgtagtgatctgcctgagaaaattcctagtccaataagtactctaaaaagttagattcataagaaaggtgattctgtttactagaagaggtatataaagaatgttccatttaggcagaatatgtacctgagacagtttccatgaaactgttgttgggcaaaataagatttttttgaggaagtcaataattttatcttttatgaacaactttactttagaaatttacttttaaggacttttggttatgctgcagataagaaatattctttttttctcctatgtcagtatcccccattgaaatgacaataacctaattataaataagaattaggcttttttttgaacagttactagcctatagagttctagaagattttttgtcaaattttattatagattaaagggtacaaatacaggtttgttacataggtaagttgtgtaacactgaggcttggggtcccagctattccatcacactgacagtaaacatattacccaacagatggttcttcagcccacatctcttctctccctcccccatctagtgatcctcagtgtctattgttcccatctttatgttcttgtgtattcaatgcttacctcccacttataagcaagaacatgtggtatttggttttctgttcttgtattagattgcttaggataatggcctcctgcttcatctataatgctgcaaaagacataacttttgttctttcttatggctgcataacattccattatgtatgtactagtctgttctcaygctgctaataaagacatacctgagacagggtaactcataaaggaaagaggtttaatggactgtcaattccacacggctggaaaggcctcacaataagtctctgatagagacttattcactatcacaagaatggcatgggaaagtcaggcctccatgattaaattacctcacattgagtacctcccgtgacgtgtgggaattatgggagctacaattcaagatgagattttggtggggacacagcctaaccatatcagtgtatatttggtacattttccttatacaatccactgtcgatgggcacataagttgattccatttctttgctatcgtgaatagcactacatattggggtgaacatattggggtgtgtgtcttattgatagaatgaatattttgggggcatatactccatagtgggattgctgggtcaactggtagttctattttaagttctttcagaaatatccaaactggtttccacagtggctgaactagtttgcatacccaccaacagtgtaaaagcatttccatttctctgcaacctcaccagcatctgttgtttttggactttttaatattaataattgctattctgactggtgtgagatggtacctcattgtgattttgatttgcatttctctgatgattagtgatgttgagcattttttcataagtttgttggctgcttgtatgtcatctattgagaagtggctgttcatgtcttttgcccaattttaattgattttttttgttttttttttttttttgcttgttgatttgtttaagttttttatagattttgtctgttgatacatatttagattttggatattagacatttaggtcctttaaggtaggaagagtacaggaaatagtcaagaagactttaacaaatttctaaaaacagagagcatatagaggaatgatatatctgtacagagagggtaaacttataaccaaaaggtcagaagagaaaaatttatcaaggatgaaaagttaatcagtgtcccttaaatcctcccaatattggtatttggaagtaccgagggtcaaagatggtggagaatgaggctgaaaaaggaggctytccctgcctacgtttcctccacaactcttttcatcaggtaactgatttcctyccacaagaagaaggaggctcactctctagagaaactgagcttaagaagccctgtactcagagacacacagcagtgccagaaaaggcatgaggtgtaggctagaaagacagattaggtacacatccactccttgaattcagagactcttagctcttttattcatcttccttcctaaaattcagcagctagctctatcctacagaaagggaactgatctagagaaatggcatttttcttttgccatcttaacagacaattctcttcaatgtccaacagagtgaatgaaatgaaaacatatactgctagatacagggttatggaatttcaggacatgagaattaaagggaaaatcacaaaaactttcagagctgtaccaggttatattgaaagaattagaattcagaattctcaagaagaactattaatattatcttgtatattaataaaaatagtgttttcagatgtgcatgtttgccaaaaatttttaccattttccctttctcagaaaaatactgaagaatgttcttcattcaaatgcctgaaaccttgttagagaaagtcctgagctccagcaatcaggaaacctcgtgtaggagaatgagagtgtcagggaggctgcctagcaccagacctagaaaacaactacttcagaacagacctgggggataattcagaagtgagatgagacagcaagaacaaaagagatgtgacagattttatgagagtttccaataactaaaaaggagtttcaaacatctgctggaacatttgtaaataattctaacttgggaaatggaaaattacaaattgaaataaagagacattgttaagcccaggaaagtacaaaaataaaatttaatcatagttgtcttaccagagaaccatatttgtgtagtcagaatgatgtaagcaatgaatactgatatcataaaaattgtcatctaaatatattctggaaaaagcagtgtggaaaagtgagtgtgtctatctgagggtgtgttcaaatatgaggggaagatggagattaaaattctcatctctcttaataaaaaattattaaatataatctacaaaaagataagtaagaattagaaacagagtatttaaaaatgtgaatgtatgttcagaagaagctgctagaatgttcaaaatggtagatttggaaagtgtgagaatgaagagaataccattgtgatttgtgacccctcccacacacagatgcaccaatacagtcatatatatgcataaatctgatagtataatttaacgtttaagcaacatatgttattttgatatgaaattaatctgtttttcaaagacagtaatttcatgactaaattatatgcttactttatgttttcaaacattttattatttttatttgtattaattatcatatatactaatgtatatgtatatacatatcttttaattttttttaatttttatgggtacaaagtaggtatatatcaatatgtttgggggtacatgagatgttttgatacaggcatgcaatgtgaaataagcatgtcatggagaatggggtatctattccctcaagcatttattctttgagttacaaacaattcaattacactctttaagttattttaaaacgtacaattaagttattattgactatagtcacccttttgtgctatcatatagtagatcttattcatctccacctcccctccccccacactaccctttcgagtctctggtaaccatctttctacactttatgtccattagttcaattcttttatttttagatcccacaaataagtgagaacatgctatgttcgtctttctgtgcctggcttatttcacttaacgtaatgatctccagttcccttcatgttgttgcaaatgactgaatctcattctttttatggctgaatagaactacattgcgtatatgtactacattttctttatacatttgtctgttgatgcatatttaggttgtttcaaagtcttagctattgtaaacagtgctgcaacaaacaagagtgcagatacctcttcgatatacctatttcctttcttttgggtatataccaagcagtagggttgttggatcatatggtcgctttatttttaggattttgaggaacatttaaacagctctccatagaggtcacactaatttgcattcccaccaacactgtacgagggtccacttatctccacatcctcactagcatttgttattgcctgtcttttggatataagccattttaactggagtgagatgacatctcattgtagttttgatttatatttctctgaggatcagtggtgttgaccacctttttgtatgcctgtaacccatttatatatcttcttttgagaaacatctattcaaatcttttgcccacttttggattggattattagattttttttctatagagttgcttgaatttcttatatattctgattactaatctcttgtcagatgaatagtttgcaaatatttctctccattctgtggattgtcttttccctttgttgattgtatctttggctgtgcagaagctttttaacttgatgtgatcccatttgttcatgtttgctttgaatgcctgtgcttgtagggtattgctcgaaaaatttttgcctagaccaatgtcctggagattttccctagtgttttcctatagtagtttcacagtttgaggtcttagayttaagtctttaatccattttgagttgatttttgtatatggcaagggatatgagtccagtttcattcttctctgtaggatattaaattttcccagcacatttattgaagagactgtctttcccccagtgtacgttcttggcacctgtgttagtctgttctcatgcctctaataaagccatacacaagactgggtaatttataaaggaaagaagtttaatggactcacagttccacatggctggagaggcctcacaatcatggcagaagatgaatgaggagaaaagtcatgtcttacgtggtagcaggcagatagctttgcaggggaactcacatttataaaaccatcagatgttgtgagatttagtcactatcatgagaaaaatatggaggaaaccacccccatgattcaatgatccctacctggcctcccccttgacttgtggggattatttcaattcaagatgagatttggggtggggacacagccaaaccatatcagcccctttgtcaaaaatgagttaactctagatacgtgaacttgtttctgaattctctattctgttycattggtccatgtgtttgtttttatgtcagtaccatgctgttttagttagtatagctctgtagtttaatttgaagtgagataatgtgattcctccagttttgttcyttttgcttaggatagttttgactattctgggtcttttgtgggtccatatacattttaggatttattttttctatttctgtgaagaatgccattgatattttgataggaattttattgaacctgtagattgttttgatagtatgggcactttaacaatattgatttttccaatccatgaacatgaaatatttttctgtttgttgggtcctcttaaatttctttcctcagtgttttatagttttcattatagagatctttcaattctttggttaaattaatcctaggtatttaaaattatgtatggctattttcaatgggattattttttaaatttctttttcttttttttcactgttggcatataacaacactactgatttttatgttgattgtgtatccttcaactttactgaatttgttcatcagttctaataattatcttgtagaatctttagtttttcctactataaggttatatcatctgcacacaaggatattttgacttcttcctttccaattttgatagcctttatatctttctcttgtctgattgctcttgctaggtcatccagtactatgatgaataacaatggtgacaatgggcatccttgttgtgttcctgatcttacaggaaagacttcctattttctccattcaggatagtactagttgtgggtctgtcatatagcttttttatgttgaggtatgttccttctatctcaagttttttttatgaattttcatcaagaagggatgttaaattttatcaaatactttttcagcatcaactgaaatgatcatatggcttttatccttcattctgttgatatgatgtatcacactgcttgatttgcacatgttgaaccattcttgcatccaagggataaatcccacttggtcattgtgaatgacctttttattgtattgttgaatttggtttgctagtgttttgttgaagatttttgcattagtgttcatcaggtgtattggcctgtagttttttttttttttttttttttttgatgtgtcttagtctgattttggtatcagggtaatactggcctcatagaatgagtttggaagtattctcttctcctttattttttggaatagtttgagtagggtcggtattagttcttctttaaatgtttggtaaaattcagcagtgaagctagccagtcttgggattttctctactgggatgattttatttctcgtttgatctttgtgctggttattgcatgttcagattttggatttcttcctggttcaatcttgatgggtcatatttgtgtagggatttgtccatttcttctagattttccaatttattggcatrtagttgctcatagtaaccaataattattctttgaatttctgcagtatcagttctaatgcctcctttttaattttttatttatctgaatctactctttttttttttcttagtctggctaacggtttgtcaattttgtttaacttctcaaaaaagcaactttttgtttcattgatcttttgttttgttttcttcacttaaattttatttatttctgctctgatctttattattccttttcttctactaattttggttttaatttgcttttgcttttctaattctttaggatgcatcattaaattgtttgtttgtcaattttctccatttttgatataagctcttgtagctataaacttccctcttagtactggtcttgctgtaacccctaggttttggtatgttgtgtttccattatcatttgtttcaagaaatttttcaattttctttttaatctcttcatgggtccactgttcatttatgagcatatttttaaatttccatttatttgtgtagtttccaaaattcctcttgttattggttgctggttttattacattgtggtcagagaagatgcttgatattatttcagtttctttgaatattttaagacttgttttgtgacctaacatacggtcaattcttgataacaatccatgtgctgtggaaaagaatgtgtattctgtagcagttggataaaatatcctgcaaatatctatgagatccatttgatctatagtgcagatgaatttcaatgtttccttgttgattttctatctggatgacctgtccaatgctgaaagtggggtgttgaagtctccaggtattattatattggggcctatctctctctagttctaattatatgtcttttatatatctgggtgctgcattattggttgcatatatatttaaacttgttccatcttcttgccaagctgaccactttatcaccaatagtgatcttctttgtgtctccttatggtttttgttttgaaatctactttgtctgttttaaatatagtaactcatgctctttttttcatttccattggcaggtactgtctcattcaattcctttattttcagcctatgtgtgtctttataagtgaagtgtgtttcttttaggcaacagattaataggtcttgtttttccatccaggtcagtaacaggtcagtatgtcttttgattggagattttattccatttacattcagtgttattattgataagtaaggacttacccatgcccctttgttatttgttttctggttgttttgtggacttctcttccttctttcatttcttcctgtcttcctttattgaagagaattttctccacttatatgtgtacagatttttcttaatatctggtttatggcagttacacatttgtgcatctgtaaccatcctctctttaagtttgcatatacttccagcactataatttaaatttataatgatgtttggataccttcatgattcatatacccctgaattgctacaacaaatgtgccatttttctccttttccatcagtttttacttgtgtcttatcagctaaagtccaggaagagattgaacgtgtgattggcagaaaccggagcccctgcatgcaagacaggagccacatgccctacacagatgctgtggtgcacgaggtccagagatrcmttgascttctccccaccagcctgccccatgcagtgacctgtgacattaaattcagaaactatctcattcccaaggtaagtttgtttctcctacactgcaactccatgttttcgaagtccccaaattcatagtatcatttttaaacctctaccatcaccgggtgagagaagtgcataactcatatgtatggcagtttaactggactttctcttgtttccagtttggggctataaaggtttgtaacaggtcctagtgtctggcagtgtgtgttctccagatttattatctttcttcaagattggtttggctactcttaggtgcttatatttccaaataatttttaaaggtattagtttgtcaatttcccaaaacyttgggctggaatttctggcagggtgacactaaatttataggctagtttggaaagaactgaatcttgacacgttgaggctttccattcctgaatataattatgcttccaatttgtttggggtttcttttatttaaccaggaatgttgtgaatttgttgtcatggctttcgagtctttggttttccctagataattaatatttttgttgtagaacataaatagtttttatcattctgatgatgttaatctgtcaactttgctaaatttactagtcactattcgtaatttatttctggattcattgtaatttctgtgtatattatactgtatctgagttaatattgttttatttcttattttccatttctcrtgggcttaatgtctctttatcrcattcattattgcattagctagaatttctaggagagcattgaatagaattggtgacagtggggatccttgtttctcatttctaatctgcaggaagcagtggaagttttccatttcaatattgagaatgatgcttgaagtagattttggtagatattttttatcagattagagaagtttgctgtcatatatatatatgtcataattgtgtgtaaaatcttgtcaaatcaacactctgcatctatttatataattgtgtgttagtccatttccattgctataaaggaatatctttgactgggtaatttataaataaaagagtttcattttggctcatggctctgcaggctgtgcaagaggcataatgtgggcaggcatctactcctagtaaggacttcaggtagctttcaatcttcggagaaggtgaaggggaagcaagcatgtcacatggcaagagagggagtaagagaaaaaggagtagaagtgactttaaacaaccagctagtgtgtgaactaacagaatatgaactcacttattatcatgggaagaggtttaagccactcatgaagaattcacccccatgtcctaaatacttctcacaccagaacccacctccaacattgagaatcacatttcaacatgagatttggaggggacaaatatccacacaacatcagattatatatattgggcttacatttctcactaaatagaaataagtatgcacatagagatgaactggccttcttcatattgtttaggacttcagtgtttacattcacaagagatttggtttatagttttatttctcagaattttcaagatttttgatattaagattatgccagccttataaaactatgcaagaaatgtttcctaatgtgagactgtttttattgccgttccctctccccacttttyttcttgtgatcayttagttgtatctttgaaatgcctgataacttttggttaaataccagatggtatatgtaagaaattgcagaattgcagaggaggtttatattcttcaaagaaagattcattcctctcccatcggcagtcataatgacatgatacctgttgtcatgattcagaattggacataatgtgaatccagttgaaaattgagtgtcagtgttagcttagctctctgaggttctcctacctttggaagcttgagaccaatttttgtcttgacagctttgcagtgccttctatcacatggtttctgtatttatccagacactccatttgccatctcaaacctactcttttccaatcaaaaccaatatatattattagtaaaataaaaaataatataactgaaagttgtattttcaaggggaaaaagcaatgasacttggtaaggttgcaattactaatgtcatcttttgaagaagacagaattgataatttacttagagattatggggcttaccctagtggtcactgagttagtacaagagaaaagacttcaatgcactctgttttcacaaacacaggagataaccaggagactttcgcttctcaaaattagggtctgagggtaatggtaatgaaacttacttcttctcctataactaattaaatgagaaatatactgaagaatcaggcacgagttgccagtctccccagttcactgcatcagctttggtgacctcctggaggggaacgctgcatctgatgagctcatgctgtgcctgatgtcttttgagccctgagaagccagagcccaaggggattacccattgaatcccttcttcgtggaatagcccagtgcagaaaaaagcagcactgtgtggccaattctaccctctttacaaatcagatacatgtgttcttctgctacaggctggatccacttatctagctggagatgatagtctgagacaggagttggcaaactgtctctgtaatgggccagatagtaaatattttagacttttcaggcaatgtggtttctgttgcaattcttgacatctgctattgtagcatgatagcagtcacaaacaatctgcaaatgaatgaggattgatatgttccaatttttatagaaacaaatgtaaatttcctataaaatgtttgtttcaaaaatattgtttcttgtttgcatttgttcaatgtaartacttttagctcacatactatacaaaaacaggtggcagggtggacttgtgcagggagtattttttattgatgcctaatataagacatccctgtccagtagaattttctgcaaagatgtgcgattgatttgtgcttttatgtcatatttaaagaatatttgtcagcacaagattccaaagactggctttcaactttcccagaatttttttgttttagctcttatatctagatcaatgacatatttcaaattaatttttatttcataatatgaagtaatagtggtcatgcttcaatgtctataaatttctacttattcaagtaacatttgttgaaataaatctgctttggtatcaataacattttaatatagtacttgtttataaatattcaagggaatatttttaaaaaacaaaattatagactatttatatgaaaatttagggggtagaatttttcctaacatttttattataaaattttttaaaataaataacattacacacacatatgtatatgtacatatggcagtgtgtatacatatctactctgatatctgtccatccatctatttacacctcaatacttcagtatgtatagcacaataacaatggttttctcctacataataatagcattcatactgtggagttattaatacaataatattatttactatacagcttttatttaaaatttcccaactttaaaataatattttaatcacttttttcttgcaattcactctccagtcaagaaataagcacatagtttcagtatcctgttactttccatctcctgtaatcaagaagagtccatttcctctgtttcctttcagtatgttgatctctgtgaagagttgagcaattagtcatttaaattttcctggggctcgttttgggtaattgttttctaaatattatattccagttatgactttggcaagaaaactacatagtattttgaatattctgctgaatcacagtggtgaggcaggggcacataatgtcacatatgccattattggttatgctaagatcctcacctaataagttggaatctgccagatctttccattgaaggggttctgctttttatgcgtgaatgatgaaaatctatggcatggtacttcaaggcagaacaccctgtttcccaagtcacacatccaatagttttatctttcattaatgatcctcatctgacctgatgatcttgacctgaatggttacaaataggtgatttttctaatttcatcattccttccgtatttttaagctaggattaatctgtaatgaatatctctcccatatctttaaatgaagacaaacaaactgcatggcaatgacaagaactcaatagttttatccttgccactacacttgttaccatcccagaagatgtcatttgaaattcaatcatatgtttattcacaaatgccctgtgaacagatactgtggccatttcccatgtcaacagagacttcaacttttagttatactctacacataaggttggtgaaaactgaagtgatggaatagagaagcaagtgtggacagccactagtttccaagcttgatgaaaaggaggacagattcagaaggttgcatccaagtatccaagtactcaggacttcaaatgtgattgcagggcactttagcaagattattgtcatgggccttaagttcatgactcttattacttggtctatccatctggaaatggtactgcccttctttggaacgggatttcctcatctgcacatcaaaagatttaactacatgattaccactgtttcttcaaccttcatggcttctttacagctcagttcatctatgtctcttgtttctagggcacaaccatattaatttccctgacttctgtgctacatgacaacaaagaatttcccaacccagagatgtttgaccctcatcactttctggatgaaggtggcaattttaagaaaagtaaatacttcatgcctttctcagcaggtaatataaatttatttccatttgtgtttcagggtacaagataacttttttgatccattggaacttacatgtgcctcctctgcagtggtacaattactctttgtacatgatcaagagcactgttctgaatgcctgtgtacaccctgytcatgatacatcctaattattgggccagattagtggactttggggagttaatccaattcttccaaattgagaaagctgaaatataggttggttgaattctgcctctaggtacaccagtgaggtacccaagaactcctcctggaagataaaactaattacattttcctcactagccatgaggaagttatctcactccagaacttcactgagtgtcttccacatggtgtccctcaccccctaggctgggcttgtaggataaaattatccacaaacacagaatagggtcttaaaaggctcacttctgagtttggaaagcagagtaaacagatcattgtagttcaataggactgaggctgtgatatggaaagaacaggctgttgggggttgggaggtagacggaaaagctgtctgcttcttgtactcttataccccaaagtgaggcataagtaatattttaatagcagtaaagacatttgagctacctcaaaggaggcagagaggatgaaaagaagagaagacagggctattaaaggagataatgagccacaggagcaggacattggctctaaataaaggatattagaacctttgccaaatgaccatggatgggatgagggggacattgggaatgtagcaggatactctgcagtgatgcagagcaccatgctgttcccctagtcatggccatgtatattggatgttggatctccatacttgaaatgtgtgtgctgagcatctggtgatagaatctccttcctttattctatgacctttaatgtctgctttatatctgccactgtagataccaagacaacaagaaaagaaaccttccttcaagcattcacatttagcacatgtattagtccactcttacattgccttaaagaactacctgagattgggtaatttatgaagaaaagaggtttaattcactcacagatccacaggctgtacaggaagcatggctgggagacctcaagaaacttgcaatcatggtgggaggcagagcggaagcaagcacatctttccatggcagagcagaagagagagaacaatgaggaaaggctacatacctttaaacaaccagatctcatgagaactcactcactatcatgagaacagaaagggggaaattatcccccatgattcaatcacctctcaccaggtatctcccccaacattgggaattacagtttgacatgagatttgagtaaggacacagagcccaaccatatcgcacactaataaataaataaataaatcagtaattattattctaggtgatccatgctgtctgtttcttctgccataacaaaatatccaagactaggcaattgataaataatggaaatttatttctcacagttctgaaggctgggagttccaagatcgatgtgtcagcaagttcagtgtctgatgtgggcctgttccttacagataatgcccccwctgtatccttatatggcagaagggcaaaaaggcaaaaggggagaaatggctcccttgcatctcttgatgttattattttagcaaggacagagccctcctgacttattcacttcctaaaaggagccatctctttagtaatgttgcattgggattatgtgtcaacatatgaaattgggggaggcatattcagaccatagcacatttttcaatggaaatataatgttgaggaaacccagagaaggcaacattttcttgctcaaggagatgagaaagagggtaaaaaaggagataaaatttgacctatgtcctgactgtggtaatagaaaagttcatcttggctaaaaggagcagcatgatataaaatttgaaacctcatggtgtgttggagactgatgatgagtggctatgcctagagttgacagtatcggatttgaagagtgtaaggagtgatgtggatcatcagactggaaacagaatgtgagggtccagatcaatccattgggaccttatcctataggacatacagggaagccatttaaagttttaaagtgagaaggtgacatgtttagacatgtgctcctgaaagtacctagaggaaaaaaatctttggctgcatattgagccagaaatacaaagggaaatacagtatgttagcctcctcctctaagcccttctcagttcaacccactggacaagaaatgtatgtttctaaagaaagattgatgaagacatttaaagtctcttgaaagattttaataaagtgcttggcatgtagctggtactcaacaaatatttgttgaatacagggtgcctgttaagatctgatattaggtgaagagtaagtatgtccattcatttttcagttgcctatacatccatccattcatccatttatccatccactcatccatccattcattcatgcatgcacccatccacccatctatctcttcatctcttctacgatwcactgaacagttattgcatattctgtttgtgccagttacagagacagtgtttgtcactgtcacagttacgcatgaggagtaactgctctctgtgtttgctattttcaggaaaacggatttgtgtgggagaagccctggcyggcatggagctgtttttattcctgacctccattttacagaactttaacctgaaatctctggttgacccaaagaaccttgacaccactccagttgtcaatggwtttgcctctgtgccgcccttctaccagctgtgcttcattcctgtctgaagaagagcagatggcctggctgctgctgtgcagtccctgcagctctctttcctctggggcattatccatctttcactatctgtaatgccttttctcacctgtcatctcacattttcccttccctgaagatctagtgaacattcgacctccattacggagagtttcctatgtttcactgtgcaaatatatctgctattctccatactctgtaacagttgcattgactgtcacataatgctcatacttatctaatgttgagttattaatatgttattattaaatagagaaatatgatttgtgtattataattcaaaggcatttcttttctgcatgttctaaataaaaagcattattatttgctgagtcagtttattagaccttccttcttttatgcataatgtaggtcagaaattaaagaaaatagagttccaggaggccatgctggttctcaaaatgataaggacagaaaggacaaagaggaagagggtagggaagctattttgggtgagtgttagagttacttgaggattggatttgaaagtgagaaactgtgtccaggggcagctctaacctctagggaaatattcagaggatcagtcaaagggtggaatggacattaaatgctagaattcttatatccacattggtgttcctttttttttgagacaaagtcttgctctgtcacccaggctggagtgcagtggtgtgatctcagctctctataacctccgcctcccaggttcaagtgattctcctgcctcagcctcctgagtagctgggattacaggtgcatgccaccacacctggctaattttttgtatttttagtacagacgggttttcaccgtgttagccaggatggtcttaatctcctgaccttgtgatctgcctgcctcagcctcccaaagtgctgggattacaggtgtgagccactgcgcctggcctggtgttactttgaagtgtcattactttatctctaaataaagaatcagattacttttattacttcatgtttccaacttagaatgatgtaatgaagtataaatacatgctttcatatcgctgctcatgtgttctgtcatgtttctctcttcaaacataaacaaaatttctttttggtttttgtttgtttgtttgtttgttttgagatgtagtctcgcttttgttgcccaggctggagtacaatggcatgatcttggctcactgcaatctccacctccagggttcaagtgattctcctgcttcagcctcccaagtagctgggattacaggtgccaacccccataccaggctaatttttgtatttttagtagagacagcatttcaccatgctggccagactagtcttgaactcctgacctcaagtgatccacccatctcggactcccaaagtgctgggattacaggcatgagctaccatgcttggctgggcaaaatttctaagaagaattacaaagatttaatctctctcagcttctcctacattattttacttttaacataagtgggatgataattttatgctatggtcctaaatataattagcctcatgtcatctccaaagaatagacaactaagtatcttatgttaaattatattcaccacttttcctgtcttctacttgaaatgtaagaaataagaagtaacataatttgttatgcttctcacagctcatctcccagaagaagttacttacattttggaatacgttttaaagataatatgtggatacaggtgtacatgaacatctatatatgtctgtgtacattatgtgtatttacccattttatatatatgcatatatatatatatatacacacacatatatgtaacttatgcacacatacatatagggttaaatgtttattacaatattgggctcatatcacacatcttgtattaaaacttgttattttcctatcaagtaatatggcagcaaaacctctaaggtgatagaaacatagggaaatgattgagagagataatagaagagaaagtggaaatgagtattacattaatgggaagatccaaatggaaattatacattatacctttcaaccttcttcattgggaaatgcaaatgtattaatgtagtgttagtagaggtgctggcaaacacccctaggtgagataaatcaagtagatgtcaagtctgttttctcctagagactgtagtgaataatctgttttcctgcctatttcacctcctaaaggctgcctgcattccttggctcatgaactcttccttctttcactccaaacacttgcttctgttgtcacatctcctactcctactactgactcttattctcacatctcccttacattagaaatgcaaaatgctttttccctggtgtcacaaagaaatagcactcaaacataaatttaattttctcggcaaggcaatttttactttctgcagaaagagtgctccttgcagatggaacaatggtgagagcacacctggacagaggaggagaagaggttattattcctgatggagatagcctttactgctgtgtcattcccctattggctaggttggactgcacagtctaagcaattccaactggctattttaaaaaagagcaggagtatgagccagagtggtgaggcatgtagtttggcaggaagggcagttacagaactggtggctcaggatgagtcaggatggagcaggtgaccaggggtgagtcatatcaaagcaggtgaccaggggaagagatgtgaactactgattaggactggtgggaaagttgtttactgaaattagaagggagggggcaaagggaaccaggaagttaaactttaaaatggagaatcaataagagagctgaacatactgacatactgattctttgaatagaaacttggggttcactatatttaacagttcttcatcttgaatttttacagttccttctcttcaaacttccttaaaatgtcttggcttagttgttctgcatgattctctaaaagaaaaagcttctctgaataaggtggaggagaattaagggaggttttagtaagtgctgcctgtatgagtctgtgaaccagcccacggatgcatggtatgacaaaacacccaacaagaatgaatacgcctactatggctgtgagagaagtaagaactgaggctatgattttttttttccatttactgaatgatttttctaggcaccttttaaaggggtcacttaccgctgagtttttggttaactcattggacagagcagttagaccttgcaatgccttgttatacttccatcaggggcagtattgtttgggatgaaggtacaatattgagttttaatcatgatgcaaactcctcctccttctgctgctgatataatgtctaaggctattctattttcccaagccatctggctagtagcccctaattgcattgctatttctttagcagcatctctagtgtagttaataaaccactgttgatcataatagatgtaattcatccagtctacatttttattaatttttacccactagaatattgactgaaatcctgaagctatttgatcatgggctttaaattcatctggcactcctcattgagctctaatagcatttacataaacatgggggtcaaaggacccatatagggcacttcttcttttatgattttctctctttttttgtaatcatgttgatgaaatgctagagtgaaagggatggtgaattggactagagcacaagtgctgctctaataacttggcagagtatccagcaatagtcccccatgataccaccacacttatgctcagggatgaacaaggacagactgattggtaagctcttggaaaggcttggttacactgcaccctgttaaatcttcaaggaatgctaactttttcccctgctgtgaaaggaatgaggtgaagttaacatcaggggctggaggccagaaggcccttgagggctgacccacagggctcttaacctcagagaacagcagtaaaagagccttgcatgactcatcgccccaggctgtggggttctggaagacagctaccatacagctcatgccaggtccctgagaggaccacccaagtggaaagggaacaatctgggtctctggcctgcctatcgcacaagcgttacagtcacttttgtttatygtgcaaacagaatattttatccattccagccaagcatttgcatcctgataccctgtttcaattgctatagtttgttttaaatagttaacctctacaacaactagtttggttttatcattgggtatataacaagagaatgttggttagaggagaacttaggagagggagaaaagggtacaggaagtgaggaggaaatgaagcacatttcaaaggatcctgagacttctgctcctataccatagaaatggtttaatgaaggggaagaactctggggaacagagatggtaatctgtactggattacattggtttagctgacagtggggagggatagctcctttagtaaaatgaatatatggttttaagaaactgcaagtactagttagtgtggtccatccttgctctttagtattttatagagcattgagccaagtttggcagagaagctctgctctaggaggacaagatttccagtttatactggaatcttcatcaaactcttctcaaactaacttatcccagttaacagatttttagtctgaggagagctaggaaggataaagatagttttctgaagtggagagttgcccctaacttggcaaatctccacagggtataacaaggcaaccatcaaatgtaatagtttgaggcaaaattgacttggttacattaataactaggtagtcagcaatagagcaaggaaagaagaaggagtaacagaatagatgaaaggagttaaatttttcttatctttagtttgatagggttttctcctgggactacggcccatgactctggagggggcagcactttcttgacttgggtgtgatgggtccatcctttttctgctgtccagactgccatttcggtagttaggagcactaggtaaggtccttcgccagttcaagttttccttctctctaacttttgacaacgacgtggtccccaggctgatgctggtgtgctggaaatgctaggggtggcacctgtgctgaaagacctttagttctgagggaagggaaagtggaagataaaccaagtatataatttctgagaaactgatcttctgtttcaaatgtagagaaatcagtagtagaatgtagataaggcaatccataaagcatctcatacagggctaggcctatgtcttttcagggagcagttcagactctcaacagggtaataggccttcctactttccttgatgaaggtaggtgtcagagattatgatattcccatgttatatccagtacctgggctcatttcttttttttttttttcaacctaggctggagtgcagtggcatgacttggctcactgcaatctctgcctcccaggttcacaccattctcctgcctcagcctcccgagtagctgggactacaggtgccccccaccacgcctggctaatttttgtattttcattagagacggggtttcactatgttggtcaggctggtctcaaactcctgacctcttgatccacccactttggcctcccaaagtgctgggattacaggcatgagccactgtgccgagcaacctgggctcatttcttaatgacatgtgcagtgaaatgagtcctattatctgaatcaatcttttctattaatctaaacttgggtataatattttcagctaataccttgactacactattagcagttgtacttgaaaaggaaatagcttctacccaatgagtaaggtgatctactattactaataaatatactttagatgactaattggaggcatctctatgcaatcaatctggatattctggaatggccttaagcctggattccttcccctgaggggtaatgtttttatagcttgtttattagttttcctacatgctaagcaactatctgtaactttcgccagggtgtaaatttctatacccctataaactctgagaactacatcacacatgccttggggtccccaatgggtccctcaatgcagttggaacaggatttccctcataagaggtttggataacaattttctctggtttagcaatatcctttttccttctgaatttttttttagcacctatttttattggtttttagaccaaagaaagccaaatgtcattttatatttgacagtgcttcctgtatgattttataccagataagctaaattttacctttatattagtgtgttattaatgttaaactcaatttttataaaaccttgtagacattatttatccaattttaatgtctgaccataaggtaagatttttacagactctttttaaccctttataatttttgttaaagagcagtttagtgctttaaaaaaaac

SEQ ID NO: 95879 - DNA, 39107 bp, Homo sapiens
tttctgctggtataaaattctcaaaaatcttgtcagttttctgttgatgtcacggggatgcacaccattagaactctcaagttctccacggatctttcctggataaccccaactctattcctggcttcgctgacacggttgagtggatccatgagtcacacaactctctttagcaaattattgtccagacacactcttcaggccagaacttctcctccttggcagtatagttaggctgagaattttccaaatcatcaagtcctggttcctttttgcttaacaattctgaggcaggagaatagggaattcaggccatcaagggttaaggcagaaacaaaagaacagcaggtgcagccaggtctaggcaaaactgggcagcacacaggccacatccttgctcctgtgataatgagacagaagtttccacatcagcctctgattgtgtgccaagcctccacgtcagcctctggtcacaggccaatccttcatgggctgtggccaattggagtcctctaaagggcactgaggggagttgcttggttcctttagcttaataaaaaccccagttgaagaggctcttgaaccacttgctcaagcctgctcccaccctgtgaattgtacttcggcttcttcaataaatctgtgccttcattagcccgttcttttgttgctttgttagtgcgttttgttcaattttttgttcaatacaccaagaacttggacaactcacagttaagacattccatccagtaacaattcctacctcaatttacctccttccacttgcattttaatgtaagcaggctgttttccaactcctggcttcaagtcatcctcctgccttggcctcccaaagtgctgggattacaggtatgagccaccatgcctggccccggctaatttttaaatttttttcatagagatgggggtctcactgtgttgcccaagctggtatcaaacccttggcctcaagtcatcctcctgccttggcctcctaaagtgctgggattacaggcctgagccaccacacctggcccctaagagatatattagagtcttaactcgaagtacctatgaatgtgactatttggaaatagagaacttgcaggtgtaatcaaattaagatgaggtcataattggatttggatgggccctaaatccaatgaccagtgtccttatagcaagagtggagaaaaagccacacacaggggagaagacaggggttggactgatgcctctacaaagccaggaataccaaggatttccaacaaccaccacgatcttggagagaggcatggaacagactctccgttagaacccacagaaagaaccaatcctgccaacacctggatcttggactccagcctccagaactgtaagaaaatacatttcttttgttttaagccacccagttggtggtaatttgctgctgcaatcttaggaaacaaatacagattttggtactgaaaagtggggtgctgccatattaatatacacaaacatggaagtgcctttattaatagattggggtgatgggcagaggaagaagtttgaggcacatgatagactaagcctagattgccttgaagagaaagtgggtggaaatgtgagtgccccatctctacaaaaaataaaaattaggtgggcatggtgacacacgtgtagtcttagctacttggaaggctgaggcaggaggattacttgagcttaggaggctgcagtgagttatgatcgcaccactgcactccagcctgggtgacagagcaaggctctgtctctctctttttttttttttttggagacagagttttgctctgtcgcccaggctggagtacagtggcacgatctcgactcactgcaacctccacctcctgggttcaagcgattctcttgcctcagcctcctgagtagctgggcttacagaagcccatcaccacacccagctaattttttgtatttttactagagacagggtttcaccatgttagccgggctggtctggaactcctgacctcaggtgatctgccctccttggcctcccaaagtgctagaattacaggcatgagccaccacacctggccagagaccctgtcccttaaacaaacatatcttttggaaggacactgtttaacgtagtacaacgagttattccagtagtctaagtttgacagaagttgttcgttgtagaagaacttacttggaaatgaatatcaaacatctttgtattataaatataatacccacaagtttttcttaaatgtttttaattttccactagtttcctgctgtgaaaatattgctctaatattcctaaaactaacttctacttctagaaagccactctgggtctcatggacatttcagagggctttattttatcaatattttaataatactttgcaagacctaagtctccacttacaagtttgccactagatggaggtattgactagatctccttgacaaatgtaataaatcccagataaaccactttttgagtagctcttcattaatacatctgtccagacactattgcctgctatgacaggaatgataatccaaagccacaaattcagatatgcaaaaaatgtttttaaattttttctttggccaggtgtggtggctcacacctgtaatcccagcactttgggagactgagggaggattgcttgggcccaggagttggagaccagcctgggcaacatagtgagaacctgtgtctaccaaaatactagtactaataataataaattttaaaatacaaacaaaaataattctctcttaattgtatttaattttcattccaacactccatttctatttcacagaagaaatgttaatctagtcactttcttttttttttttgagacggagtctcgctctgtcacccaggctgtagtgcagtgacacgatcttggctcactgcaagctccgcttcctgggttcacgccactgtcctacctcagcctcccaggtagctgggactacaggtggccccctccatgcccagctaattttttgtatttttagtagagacagggtttcaccgtgttaggatggtctcgatctcctgaccttgtgatccgcctgccttggcctcctaaagtgctgggattacaggcgtgagccaccgcgcccggccaagtcctagattcttaaatgaaattattagctacatttttgcctggtgctcatattggtgataaagctactcttatttttttgaagtttagttttaaagagcagcttgcctgctgtagctccagaaataaatgtactattcttctcccctcaatgctcctaaatgtctctgaacttctctagaagctgtcctgatgaacatagtggcactttttcctggtagtgcctctgatggcagaattgtccaattacagctgacttctatgttcctagttaggtttctcctagggcaggtgtctcctaagacacaactagtgtagtgagtgcctagaagcctagacctagcaaccagactgcctagattccaattgcaactgtgtcactaactactagctttgtgcccttggacaaacttctggaaaatgtggataatgctactccctaattcagtggatttttgggagaattaaaattaaactgtaaaagaactggttcatattaagaactatgtacatagctatgtaaccagtctttttttttttcttctttttttgagacacagtctcattctgttgcccaggctggagtgcagtggtgtgatctcagttcactgcaacctccacctcccaggtttaagcaattctcctgcctcagcctcctgagtagctgggatcacaggtgcccactaccatgcccagctaatttttgtatttttagtagagatggggttttgctatgttggccaggctgcttttaactcctgacttcaaatgatccactcacctgggcctcccaaagtgctgtgattacaggcgtgagcgaccacgcccagcctaaccagtcatcttttactgtgtgataccctagtcatcagctttggcctctcacaactggtaatctctatgaggccagacctttagttttctgagtcatttctttaacaattcaactttttcagttagaaatatctgtttctctctctctctctctctcacacacacacacacacaaagtttaaacactgacatacaatgtaatgacttcctttcaataattctcgaagcagcccagtatgaaaaatatttgtctttggcctctggtagaagggaaaggtgtgagtgtgacattccaaggaaggaggtaggccttggtgagctgttgaatagagaggttcttcggtgcaggaatcacaggggactttaagggacaaacctggagtgatggggaaattaaagacagggtgctatattaaaaaattaccctggccgcgtgcagtggctcacgcctgtaatcccagtactttgggaggcctagtgggggcggattgcgtgagctcaggagtttgagaccagcctctgggcaacatggtgaaaacccgtctctactaaaatacaaaagattagccaggcttggcagcgtgcgcctgtaatcccagctactcgtgaggctgaggcgaactcaggaggcagaggttgcagtgagtcaagattgcgcctgggtgacaagtgcgagactgtctcaaaaaaaaaaattacccccaaacagacctatttaggtggcttatgcctataatatctgtgctttgggaggccaaggccagaagatctcttaaggccaggagtttgagaccagcctgggcaacatagcaagaccccttctctatataaaataaaaattaaaaaaattagcatggtggagcatgcctgtagtcctagctacgtagctacttgggaagcagagacaggaggatcccctagctacttgggaggcagagacaggaggatcccctgagaccaggagtttgaggctgcagtgagatatgattgcaccactgtactccagactgggtgacaagagcgagaccctatcttaaaaaaaaaaaatactccaaaacataatggcctaaaataacaaccatttgttttctctcgtttctgtggaccatgaattcagacagcatggtgggtatggcttgtctctgctccatgatgtctggggtctcagctggagtggttgaaggttggggactggaatcacctgaggcctttttacccatatttgtatctggactgagcctggaatttgattgcttcaaaatattttcacggctgggtgtgatggctcacgcctgtaatcccagcactttgagaggctgagtctggccgtctgcttgagcccaggagtcagcaaccagcctaggcaacatagggagacctagtctctacgaaaaaaaaaaaatacaacaatttgctgggcgtggtcgcctgcgcctgtaatcccagcactttgggaggccgaggagggaggctcacttgagtccaggagttcaagaccagtctggccaacatggtgaaaccccgtctccacaaaaaatacaaaaattatctggttgtggaggctttcgcctgtagtctcagctactgggatggctggggagggaggatcgcttgagccctgatggtcgagattacagtgagctgtggtcacgtcactgcactccagcttgggtgacagagtgagaccttgtctcaaaaaaaaaaaaaaaatcctaaaatattttcatgagtttgtgctgggtaggcctaagggaaacatgctcagtaaatcgaaaaatctcggattacacataaaccaccggccccggcaggttagacttggtggacacgggagccagcagcgtgtcaggtgctcgttgaccccagcgccagtgtctccatccacgtccttcactcgtcaacctttcctggcccaggctgcggtgtcccagcgccaggctccgccccgcccttggctgccggccaatcgccgccgactgagaggcgactattggaggaagcgggatgggcggtgcccgcgccgggccgctaggggtgcggggttggggaggaggccgctagtctacgcctgtggagcsgatactsagcccwctgcgaccawggctgtgctgscggcacttctgcgcagcggcgcccgcagccgcagccccctgctccggaggctggtgcaggtgagcggggttcgtccccacagcactcagacccgggatgcgaggagtccccgcctcggaagcttccagcccgcggccgttgcggctcccgcggcccgggcgcgcggcttaggccccaggacagtcacgcgacgggttctggtccaaaaaccgcctaagtgctccgataacacccagggactcgcctatttttacagcgcgtttctacttccaaggtctcggcgtaatcatcttaatgagcgttactggtgtgtcaaacaagggcacgtgtctgggcgggcaggaccgccaggattggcgctggcccggcctgagcggtgggatcggggagagtctctttgcaggcctgtgcagctgctcccgagattttctttaaaacatatttgtgtgcgttattgtcaggagaggttccttttcttttttaatacaatagataatcattgggcatacaaggggagagggcaccatgtgatcataacagatgttttttggagcagcctgaaatttatcagggaaaacaaatgactactcagataatacaataaattatacttgacatatgagcaaagctcacatactgagggcgttccaagggctgtcgctcttctgaccgttgtgtttagggaacacagcaggggcagagtctcaaagaatttattctccacatgcgtaagcaagggagtacgcaccacagattgtcaggcaaagcctcaggaataggtagagaccttcagggtgtggttggtgaagcttgagttttctaggtcgatgggggcaataagcttggagatccagttatgttgtgagtatggacttgaccctagttaagtagggattgttgatatgtttgtttttgttgcaatggtaggtcactctagttcttacgtctgggcgtagaataacattacttgcacaagggtgctggcggtaggagctttgcaagagattgtaaaagaaccagtctaggacttgacaattagggagtgagggtgcgaagccaagggaaaagaaagagtctaaaattgatcctgggtgactgagataatagaaaagtcacaaggcgtaggtttccagggaagatgagtttttagcctatttgttagtctcatgggatgagtgaagaaatcacaagaaagtaattaggttatcttgggtttcagtcagtattgactaggtgacataggtgaactaggtactctagagatgtaaaaaaaaaaagttcagaaccttcttaatttatggtttaattaagatcttacaatcaggttggttgaggtggcttatgccagtaatcccagcactttgggaggccggggtgggtagatcatttgaggtcaagagttcaagaccagcctggccaacgtggtgaagccccacctctattaaaaatacacacacacacaaaaattagctgggtgtggtggcaggcgcctgtaatcccagctacttgggaggctgaggcaggagaatcgcttgaacccgggaggaggggaaggttgcagtgagctgagatcatgccactgcactccagcctgggcaacagagtgagactccgtcttaaaaaaaaagatcttaaaatgaaacacaaatactcctcatgaaaaaaataagcctgtacatgctgtaatgtatgatatgtgacattcatattactgaactctaggaagcagttgtattggacacttgaattaaatggtcatttactgaactataaacaggatttccagttttctgtgctattttgtagaatggaatttgacctctcattacattggctcttttccctttgcttaccaggtctcttttatggtcaacaaatctttatggactttattggagcacattgcctttctagctctaatcacttttctctctctggtcaaaggagtggtctttactcattacctcccatgtattctgcatctatttctccttaactctctgcagttaaatttctttgccactgaagctgaaaaatacagtgatttcctttttctttgttttttaattatttttttaaatctattttaattttagtttttgtagacacggggtctggttctgttggccaggctggtcttgaactcctggcctgccaaagtgctgggattacaggtgtgagccattgtgctcagcccaagttttttcttcttgacctttatcctatatttgacactattgaccactcccttcttgaaactgttttgtgttttgatccagttttattcagcttcttttaatactcagacttaaaaaaaaattcctgtattgtgccagtcttgggcttatttgctcccagattcatttatcttccctcccctagtctgtctgcattactgtaggctgaccaatatcagctggcttctggctgggtgtagccactggaaggcaccagtggaagattggaagataggaggaagggagaagccagaataatttgtctgtctgtctgtatctggcagtgtctgtctctcttgtggttcccgcttctgctgggatcctgaccccttggctttggtaaccttgcttcttccctttgacctaacagcctgtatgctacttccttcctgttgctaatttctttctttcttttttattttttgagatcaagtttcgctcttgttgcccaggctggagtgcagtggcacgatcttggcttactgcaaccttggcctcccgggttcaagcagttctcctgcctcagcctcctgagtagctgggattacaggcatgtgccaccacacccgctactttttgtatttttagtagggacgggctttcaccatgttggtcaggatgggctcgaactcctgaccagctcaccaggtgatccacctctgatgatctgcccaccacagcctcctaaagtgattacaggtgtgagccaccacacctggcccccttccctttttctaatcttaccctagtacactcagttcccccgcagccagagtggtctttttataacataaaagctttcagtggcttgtcattgcccataggccagaatctagacccttatgatctgctgggccctacttagttctgtggcctcagctgctgccgtgctcactctgcttttgccacaggacccttctttctatacttagtatgtgtgccaattttgttccgaattcgtggccttagtcctacgtgttcctgatgcctcaaatgttcttttcctggatctttccaaggatgactctttaacattcatttctcagctccattaacattgctagaaggccttttttgactctcccatgtaaagtaggccgtcagttactctctagttcatgatcaattttgctggtttcataacatttactgtagctgaaattttgtttctctgagttattggtaactttcagactgtcttcaaatatttgttttgtgtctgctgccatcactgggatagaaaataaataaaatcagtctcttcttggaattcacagtctagtgaggagaaaagccacctgagggttacaaaattatatrttctggaacaattagaatgtgcacgggcgttgtggaagctgagataggagtgctgacctctgcctggcatggctgagccctccctgaaagataattgtgttatgtagataaaacttaatgggttgtgttcattcagcatgtattattatacactatatggttcagtgtcctgaccatactataattttgtcattcgtttctgatattgaaggagcgctaggcactgtgctaagtcatagggatgtaacagtgagcaagagacaccatcccgccatcaggaagcctgtattatgttggaggggtggataataaaacaaagatgtgaaccacatacttacagtgtaagaggtgctttgaaggaaataaagatattcatataaaagagaggaaaaagtagagggtaactttaaatagagtagttagggtggaccactctgggaatgtgtcattagaaaagacatgaagaataggctgggtgtggtggctcacgcctgtaatcccagcactttgggaggctgaggcgggcagatcaccaggtcaggagatcgagactatcctggctaacaaggtgaaaccctgtctctataaaaatgcagaaaattagccaggcgtggtggcgggcgcttgtagtcccagctacctggaaggctgaggcaggagaatggcgtgaacctgggaggcggagcttgcagtgagccgagatcgcgccactgcactccagtctgggtgacaaagtgagactccgtctaaaaaaaaaaaaaaagaaaagacatgaagaataaaaatgagccagccatggagagctgggaagactttttgttttgttttgtttttgatttttttggagacaggatcacactctgttgcacaggctagagggcagcggcgcgatctcggctcactgaaacttctgcctcctggattcaagcgattctcccacctcaacctcccaagtagctgggactacaggtgcccacccccacacctggctaatttttgtatttttagtagacacggggtttcaccatgttggccaggctggtctcaaacttctaatctcaagtgatccacctgcctcggcctcccaaagggctgggattataggcatgagccactaggcccggcctgaggagactattactggcagaggcacactgcagagaccttgaggtatcgggatagggtttagaacaaagagatgccagtggctggcacagagcaagagtgatgtaaatttggagagaaaacctagagccagatcatgcaggttcttggaggatgaggtaaagaatttgtatataattccaagagcaatgaaaagctgttaaattattttaagcagtagagtgatatgatctgatttacatttttcaaagctggagggactgtagagaggtgtcaggggaggcagggaactaggtagaaggccattaataggaacaagagatggtggcttggactaggtggcagcagtagacatgaggcagagtggacgaatttagttatgttttggacgctgttcacagtatctggattttagggattgcaataaagggaaggatgaaggatgattttggcttgagcacctgagaataccggcaacaaacaggttttcttttttttttttttttttttgagatggagtcttgctctgtcacccaggctggagtgcaatggcgcaatctcagctcactgcaacctccacctcccgggtttaagcagttctcttgccttagcctctggagtagctgggattacaggcgcgtgccaccatgccctgttatttttttattttattttatttttatttttttgtatttttggtagagacggggtttcagcatgttggccaggctggtctggaactcctgacctcgtgatccgcccccctcggcctcccaaactgctgggattacaggggtgagccactgcacctggccacaaacaggttttctagggttggaaattgagagctatgatttggacattcacctgcagctgtcagsttggcgcttgggtgtgagtctggtggtcagttgaaaggtcagggttggagatagaaatttggaaaatcatcagcacatagaagccttttttttttttttttgagacagagtctcactctgtcacccaggctggagtgcagtggcgtgatcttggcttactgcaagctccacttcccgggttcacaccattctcccacctcagcctcccaaatagctagggctacaggtgcccgccaccacgcctggctaattttgtttttgtatttttagtagatatggggtttcaccgtgttagccaggatggtctctatctcccgacctcgtgatctgcctgccttggcctcccaaagtgctgggattacaggcgtgagccactgtgcccggcctcataaatgctttttaaagccatgggactggatataactaaggatatagtgaagttaaattaaaagaggcctggaacaaagccctgggacattcagcacttggaggttggaaggggaagatgagatagtaaaggagactgaggtaaatatgactaatgaggtaggaaggagtccacgtttgtaatggaagccaagacaggaagggtttctgcagtggattatacatattacctcattttattctcataacagcctgtggagggtatttaagaaaaccaaggtaagtgtgtctaagtaacttgctcaaaaatactcagcttgcagggcacagtggctcacgcctgtaatcccagcactttggaaggccaacgcaggaggatcgcttgagcccaggagtttgagaccagcttggtaagatagtgagactctgtctctacaaaacaaacaaacaaagaatactgagctggtaagcccaggctcttaactgctcagcatatttctcaaagaaaggtgagcccagtcttgctgatgtgttaaaaggttaagtgagacaattatagcgagttggattttgctacacagacattgctgatgttgctcagaaccaacagtggtaaactggcagaaataaaatcctgatctgagtgggttgaactgtaaagaggaggtgaggacaagcaaatagacactgtaggtaacctggagaacctttcttgccaaagagaactaaagtaaggtgaggccatgtgcagtggctcatgcctgtaatcccagcactttgggaggccgaggcaggcggatcacctgaggtcaggagttcaaaatcagcctggccaacgtggtgaaaccctgtctctactaaaaatacaaaaattagccgggcgtggtggcgcatgcctgtagtcccaggtactcgggaggctgaggcaggagaattgcttgaacctgggaggcagaggttgcagtgagctgagatcgcaccactgcactccagccttttttcaaaaagaaatgaggtgaaagctcgggaatgtgggtcaagagacatttatttgtttttactttgttttttaggtggggggaatcagatcctgtttgtatgcttatggaattatccagaagtaaaaggggtgaatgatgtagaggagaaggaagggataactgtgccatctttgaaaaggcaactggaaatgggatccagagtaaagtggagagaaccagggaagattccattaaactggaccagaagcttgaaagaagagaagtggcttagtaaacaaggaacaaactagctaagtagaaaggggrcttttaaaatttaatttttatttcaataggcttttgggaacaggtggtgttggattatatgaataagttctttattggtggtatctgatattttggtgcacccatcaccygagcagtatacactgtaaaccaatgtgtagtcttttattcctcacccccaccccccgcctttcccctgagtccccaaagtccactgtatcattcttatgcctttgtgtcctcatagcgcagctcccacttatgagtgagaacataagctgtttggtgtttccattcctgagttacttcacttagaataatagtctccaattccatccaggttgcagtgagtgccattatttcattccttgttacggctgagtagtattccatggtatatataccacatttgctttatccacttgttgattgatgggcatttgggctggttccatatttttgcaattgcaaattgtgctgctatgaacatgcgtgtgcaagtgtctttttcgtgtaacgacttttttttttgagatggagtcttgctctgtcgcccaggctggaatgcagtggcgtgatctcggctcactgcaacttctgcctcctgggttcaagcgattctcctgcttcagcttcccgagtagctgggattacagacgtgtgccaccacgtccagctaatttttgtatttttagtagagttggggtttcaccatgttggccaggctggtcttgaactcccgacctcattatccgcccgcctcagcctcctaaagtgctgggattaaaggcatgagccactgtgcctggccttcatataatgacttcttttcctctgggtagatacccagtagtggaattgctggatcaaatggtagttctagttttagttctttaaggagtcttcagaaaggggactttttgaagagatacaatgggcaagcactaggacatccaaggataggaaataaagtgcagctggctgggtacagggatgtgtgcctgtagtcgcagatacttgggaggctgaggcaggaggattgcttgagtccaggagttctggtttattttttatttttatatatgaaaattttcaaacaaaataaattgcaactgaccctgccagaacccaagctagaaaatcactaaccaaagccatcttttgcctcttgtggtgtgccatggtctatttctcctgtctctgagtatatatgttgcattcttttgcttctcagtgtattcatggcttttctctttgttctaaccgctgcttttctgtggcattggctggtcagctccagccccttttgacttttcagtcccagtccccaccgtcatccaactgacccagtctctctgggtcctagcttgggtgagtccattccattcttgatcccatcagctctggccagaggcaggggagtcaccttgtaagtacttagggttgtcctttgagaaagacatgtgtttggagaggcagtgaccggcatgtttactacaagtaggaacttttttttttgtaagtttttaaattattattttttaaatttattatcattttttgagactcgctctgtcgcccaggctggagtacagtggcgtgatcttggctcactgcaagctctgcctcccaggttcaagtgattctcctgcctcagactcctgagtagctgggcttacatgcatggaccaccacacccagctaacttttatatttctagtagagacggggtttgaccatgttggtcaggctggtcttgaactcctgtcctcatgatccacccgcctcggcctccaaagtgctgggattacaggcatgagccactgcgcccagctactgatagtctaatttcagatcagtaggtctctgaattgtgtcctgcgttgtcagaattaattaattaatctatttattatggagtttcactcttgtctcccaggctggagtgcagtggcgtgatcttggctcactgcaacctccgcctcctgggttcaagcaattcttctgcctcatcctcctgagtggctgggattacaggygcccgctaccacgcctggctaatttttgtatttttagtagagacggggttttttcgccaagttggccaggctgatctctaactcctgacctcmagtgatatgcccaccgcagccttccaaagtgttgggattacaggcgtgagccacttgcccagcctactgttgacatttgttcctaagaagtgtggaaagaactgagaagtagtaggggcaagatgtttactctttccttttttaagaaataatttatctgctattataggtcatatttatatgagatgtgtttgcctcatataaatcagacaattgttggaagtggatagggagaaacagcaagttttacttgaaaacaatcttaaaaaatgaaaatatcttgttagattctaagactaaataatttagaacctagctttaactcaaaactacattttagaaagctatatttaagaaagacttggaattttttttttttttttttttttttttttttttagacagtcttgctttgttgccaaggctggagtgtagtcccagaatcttggctcactgcaacctccgcctcctgggttcaagctattctcctgcctcagcctctgaagtagctgggattataggcatgtgccacaatgctgggctaacttttgtatttttagtagagactgggtctcaccacgttgtccaggctggtcttgaactcctgacctcaggtgatccgtccaccttggcctcccaaaatgctaggattacaggcatgagccaccacgcctggccaagacttggaaattttaagatagtaaacttaagagttaaaacgtacatttccaatgaatagttaattagaaaagtttattataaagcagtcatttttttctaattgttaaaagtgatatattctgaccacaaaaaacttggaaataaaagcataaggatgcaggaagaaaccactataaccttatcactgagaaatataaaatgatatagtttaatattttttacattataacattataaatatttatattacaggaaataagatatgtggaacggagttatgtatcaaaacccactttgaaggtaagtaatttaaattgtgctttaaaatttccagaatttaaaggaaatgtcaataaaaatgcatatacttatgatttggatacatgtgaaagtcaaagcaggattatgtaacagttaggaatagctaactattcaaatattcagttaaagtagatgactataatagaaaaacatgtcagttagtctctgccaatgtttgttgcttccttatagtctgctacaaaacaacattccctctagaactgggcagtgttcttcttttactcacagggactcgcattgtattgtgtgtggtacaagcagagactgtatagaagatcctagaagagagggagtggaccagttgggaattagacaaggagggccattacagcatctcctaggaccttctgaagagtctctgttttgtaagggtcactaaagtgacttagttaagatcttctatcaaaatctaagcaaccattctgttatttatctctaaacttaataggagattgtggaagacaagtgtaaggagagaactgtcacagtgctgttttatagtattcaagagagcttttatcttcttttgcttaaagttcatattattgtcttactgtttaagaaattatggctctgggccgggtgcggtggctcacacctgtaatcccagcactttgggaggccgaggcaggtggatcacgaggtcaggagatcgagaccatcctggctaacacggtgaaaccccatctccactaaaaatacaaaaaattaggtgggcatggtggcaggcacctgtagtcccagctactcgggaggctgaggcaggagaatggcgtgaatccgggaggcggagcttgcagtgagttgagatcacgtgcctgcactctagcctgggcaacagagcaaaactccatctcaaaaaaaaaaaaaaaaaaaraaaaaaaagaaaaaagaaattatggctctggctgggcacagtggttcatgcctgtgatcccagcactttgggaggccaaagtgcgtggatcacctgaggttaggagttcaagaccagcctggccaacatggcaaaaccccatctctattaaaaatacaaaaattagccgggtgtggttgcagatgcctgtaatcccaactactcaggaggctgaggcaggagaatcacttgaacccgggaggcagaggttgcagtcagccaagatcataccactgcactccagcctgggtgacacagtgagactccatctcaaattacatataaaaaaagaaattctggccctggctctgtcctagttaagtggtattgccccacctaggatacaggtcttgattcctagccagagttcctttcagtaagggaccctcttagagttgtttattatgcagttaacaagagtaaagtggctgagtgtggtggctcatacccttaatcctagcactttggtaggctgaggcagaaggattgcttgagctgaggagtttgagctgcaatgagctatgattgtgccactgcattccagcctgggcagctgagcaagaccctgtctcaaaaacaaaaatacaaaaacaaacaaaaaaacaaggtacagtgatcatttcttgaattttgactgaggaatagaaaggaaacttaagcttctgtcctcaaacctcctgtagagaactgggaaggatctacatctgttttagagttggtttctataaggtcttaaatcataaagcactagcattgaactgattatcttgacagctgttcaactattgagattaatttttgatgactcattcatagaagtgtttttttgataatatatttatgtttatttaatgaaatacgatttgggtaaaatacctataatttttaccatcttgtgtcttgccaggaagtggtcatagtaagtgctacaagaacacccattggatcttttttaggcagcctttccttgctgccagccactaagcttggttccattgcaattcagggagccattgaaaaggcaggtcagtagttacttggctttttgtgttaagggagcaaaaagattccatggaaaagatatttattttgcattaactatgtatgtaacacttagaaataacttaatgcctacatttctgctttcccttgtaaagacgtctttgtactatacagtttagattgaaactcaaaactgacaaaaaaaagaaaccattcctattgtgtaatgtcacctaccttattaggtaatcactgattattaaattgaattaaatgcctttttgactttttttttttttaataaagggattccaaaagaagaagtgaaagaagcatacatgggtartgttctacaaggaggtgaaggacaagctcctacaaggcaggcagtattgggtgcaggtacctggaagacttttttgcttttatacttaaaatgtgtaaaaggggccgggtgcggtggctcatgcctgtaatcccagcactttgggaggccgaggcaggcggatcacgaggtcaagagatggagaccatcctggccaacatggtgaaaccccgtctctactaaaaatacaaaaattagccaggtgtggtggtgcactaatcccagctacttgggaggctgaggcaggagcatcgcttgaacccaggaggcggaggttgcagtgagccaagattgcaccattgcactccaacctgggcgacagagtgagattctgtctgaaagaaaaaaaaaaaaaaaaaaaaaggctgggcatggtagctcacgcctgtaatcctagcactttgggaggccgaggcgggtggatcacgaggtcaggagattgagaccatcctggctaacacagcgaaaccctgtctctactaaaaatacaaaaaattagttgggcgtggtggcgagcacctgtagtcccagctactccggaggctgaggcaggagaatggcgtgaacccaggaggtggagcttgcagtgagccgagatcgcgccactgcacgccagcttgggggacagagtgagactccgtctcaaaaaaaaaaaaaaaaaaaaaaagtataaaatggcaaaatgaaggttatttaagcttaaatgaaatattaaatgcatgatataatttgtagttatattggcagaagaaatgttgtagtttatagtaacatgctctattaagttctgcagttgtgtttgagtatcggtttttcaaaagtgacttatattggttttaggcttacctatttctactccatgtaccaccataaacaragtttgtgyttcaggaatgaaagccatcatgatggcctctcaaagtcttatgtgtggacatsaggtaagaaacaccgtccttcccatttattaatcagagtaatacctagggctaaaagacacaaaaatctaggcatattcmtattttagaaatgagattctttctcataagttagtatgttttctcacatgctcaagagtgtctggatttgctaagtccatttgaagtatggtcaaaatgatagcgtagsctgggtatcatgtctgtaagcactttggaaggtcgaggcaggaggatcccaggagtttgagaccagcgtaggcaacatagcaagcgagactctgctctttgaaaaaaaaaaaagcctaagtgtcttgtgttacaaagttgtttttaggcccaggcacagtggctcactcctataatcccagcactttgggaggctgaggctgggggcagatcacatggtgaaaccccgtctctactaaaaatacaaaaattagctgggcgtggtggcaggtgcctgtaattccagctactcgggaagctgaggcacaagrgtcacttgcatctgggaggcagagattgcagtgagctgagattgtaccactgcactccaacctgggagatagagcaagactctcaaaaaaaaaaaattgtttttagtcaaggcatttgggtctttctctgaggctgggtgactaaaaattcataaatactgtatttgccagaataagacaggttttcattataaaggagaacacggtgcttaaccctgggaatcaaatcattgcttgagcccaggcttgatgactaatttgtagtcattaagttaagttctacaggctttctaattagccttgctgatctatatcttgtctttacttgagatcaagcaagagacaggctccttagcaaaaatatgctgtcatgtcaggaggtgagacctggacacacagaagaatcaagattctctcagatctgagcccttcatttttcagatgaagatttttttcagtgtgtctgagacagccacagagttacagggctgagcatctgccatgtgacagtcattggaaatagagtggtgaacaaaacatttaaaaaaatctgtacatgtgcaggtctctgttggaaaaatgcctaaaagaaatgctgagtcaggatttgaacattttggtatttgcaaatgctttccataaaagttgtaccagttagactttccaaaaattgtgtgacttgtctggatctgcaccaccactgggtggtaccaaacccttgtcaaactggtaggtgaaaaacggtcaccagatttagtttcagaactgtttgtcatggaaagttttgtcttaattgaagtattgtggttctctagcaaatgccatttgtactatattgaaatactttcatttaatattattttattcatttgtggatatatacagtgacttataggcattcttggaagtgctttgttttgaatatttatgaccttagaaaacagtcagttttactttataatgaagaattgataccttattttctgtcacttattattgccatcacccccagtaaaaagtacaagtgaataaaacttagatgagaactgattaagaatttctctatttcggaataggcaaaatatttatgtttctttggtatagagcttgcttgtctgtatgcctgattaaagactgtaagaagatattattggctttatgtttacattaatgttttatattaaactgtttttaactagcccttataatgcaagtgatttttttttgttgacttgtaaagtagtaacaagttgattaatatttattaaacttatatatgccagttgccaaggatgtaaaaatatgacagggtgtctggcctcaaaggagcatagtctagtgggaagacttgacatgtaaacatataataatattaaaagcattgcatagtaattggggaacacaaaggaggagaaactgtttcaagaaaggatagaaataaatggtcaaggcagacatgaagtagtgttctgattagttttaagagaaatgtaggtgttttacatgttggtggatggggaaagtgcagaggtatgtgtgtgaaatgtgcatggtgtctctggagagctttaactagttccatgtgacctgaggtataggttaggctgtgagactgaaaaaggggagagaagggatactgtaaaggctttatatattatgctgagttatctaaggtgcgaaatgatcagacttacattctagccaaaatgagtcagatgagtgttgatgatgctttggtggaaaggctgcatgtcagaagatcaagtggaaaattatctcagctgtccaggaagagatgatgaggatctcagtcaaggaagtatgattattttcatgaactgagattacttctaatcttctagagcacattaaatttttagcagcatgaatgaaatgaagggttagaagttaagaatttcaggccagtcatggtggctcacacctgtaatccgagcactttgggaggctgaggtgggcggatcgcttgagtctgggagtttgagaccggcctgggtgatatagtgaaaccccatctctactaaaaatattatacaaaaattagctgggtgtgatggtgcatgcctgtagtcccagctacttgggaggctgaggtgggaggatcacttgagcccaaaaggcagagattgcagtgagctgagatcgtgccactgcactccagcctgggcaacagcgagacctgtctaaaagaaaatttaagaatttcagaagatggttttacatgaaagatttctggtattttttttttaaagacagagtcttgctttgtcacccaggctgaagtgcagtggtgcgatcttggctcactgcaagctctgcctcccaggttcacgccattctcttgcctcagcctcccgagtagctgggactacaggcgtgtgccaccaaacccggctaatttttggtatttttagtagagatggggtttcactgttagccaggatggtctcgatttcctgacctcgtgatcagcccgctttggcctcccagagtgctgggattacaggggtgagccaccgtgcccagccagatttctggtattcttattaatgtctggttgtgaacttttgagacagagccttgctgtcacccaggctggagtgcagtggcacgatctcagctcactgcaatctccgcctctactttttttttttttcttttgaggagtcttgctctgccccccaggctggagtgcagtggcacaatctcagctcacagcaacctctgcctcccaggttcaagcaatcctcctgccttggcctcccgagtagctgggattagaagtgcccaccaccacacccagctaatttttgtatttttagtagagacggggtttcaccatgttggccaggcggatccagaactcctgacctcaagtgatccacctgcctcagcctyctaaagtgctgggattacaggtgtgagccactgcacccagccaacttatttctcattatattatttaacaccatttcttttcatcagggtgaagtggtaaagagggtacttcctgtattcactgtgtaacaaatgtttaataaatgcatgtagaatacttgtttggtggtagctgtataaagggtgtcatgggtttgcaaaatatttgtattaacattgggtttttctggtgtttctgcrcaggatgtgatggtggcaggtgsgatggagagcatgtcmaatgttccatatgtaatgaacagaggatcaacaccatatggtggggtaaagcttgaagatttgattgtaaaagacgggctaactgatgtctacaataaaattcatatggtaaatgtgatttttagtggataaatgctatctaatgtccaatactgtttgatttttcttactctatgtactttacaaactgaactgaaagatgggctctataaatgttgattttagccgtgtacttttggagaatatttttgtatgcctattgcatcrgcatggctcagtcattaaagaaattttcccacatttaaatagggtaatttctgacgcttagctggcaactgcttggctaattcaagtatgtgaagataagacatgagtggctgggtgcggtggctctggcctgtaatcccagcactttgggaggccgaggcaggtggatcacctggggtcaggagtttgagaccggcttggccaatgtggtgagaccccgtctctattaaamatacaaaaaaattagccaggcgtggtggtggtgtctgtaatcccagctactcaggaggctgaggcaggagaattgcttgaacccgggaggtggaggttgcattgagccaagattgcaccactgcactccagcctgggtgacaagagtcaaactccgtctcaaaaaaagacatgagtgaaaagtgacctggtatagaaagaaatatatatgtgtgtgtgtatatatatatgttattattatttttttgaaatggtgtcttgctctgttgcccaggctggagtgcagtggcacagtcttagctcactgcagcctccgcctcctgggctcaagcaattctcctgcctcaggctcccgagtagctgggactacaggcacgtgcccccatgcccggctaatttttagtagagacggggtttcaccatgttggccaggatggtcttgatctcctgacctcatgatctgcctgccttggccccccaaagtgctgggattacaggcatgagccaccacctccggcctaagaaatatattttaagaaacgttaactattaaacactataagttaggcaaagttaatagatattttctaaattatgcaaagttaactttaaaatatttcaactttttatcagggcagctgtgctgagaatacagcaaagaagctgaatattgcacgaaatgaacaggacgcttatgctattaattctyataccagaagtaaagcagcatgggaagctgggaaatttggaaatgaagttattcctgtcacagttacagtaaaaggtagagataatgttccaaaaaggatgaatagacttttcatgttgctgaatgttttatgcttaagttttaaattaggacattatcttggttcatttcaactgcttatggttaataaaaagtgaagagttgccagttcagagagaatataaatctacccaacttaatgtcagatttcaatccatttataagatccctgagtattactttaaatttgagaaatttattagaactttttcctgtgacagtcaatacggtattttaaattgaaaagggatttactagaaggttaccgggagtgcctccaagaactgaaggatgaacagtagcaaccattcagctctgggaacttcagggattggaactgggtgttcactactactaagacatgctctcttggcttctcacacctgcaggcttttgtgctttattctctcagcctttctaaagttgctgcctctacctctagggtcacatatatagggttctcaaaaaggagagactttctcaccagttccagcagaataaatccacaatgaagactcattaacttgctttaggttacaattctattccaggaatgattactgtgctctaggtgacagaatactagagcttatctagtgyaggtcagacagctgcctctggggtcaggagagtggggtctgtgatcatagaagggagttgaggaagaaaaggggacatggaggtgtagaagatttaaattttgtggctgggtgcagtggctcacacctgtaatcccaacactttgggaggccgaggtgggaggattgcttgagcccaggagtttgagaccagcctgggcaacgaagtgagacttggcctccacacaaaaaaattaaaaattagctgggtatagcagcacacgcctgtagtcccagctactagggaatccarggcaggaggatcaattgagcccaggagtccgaggctgcagtgagctargtttgtagcattgcactctattgggagactgtgcaagaccatttcaaacaaacaaaattagctggctgtggtggctcccacctgtagtcccagctacttgggaggctgaggtgggaggatcacatgggcctggagaggatgaggtaaactgtgatcatgccagcctaagcaagagagggaaaccctgcctcaaaaaaaaaaaaaaaaaaaaaaaaaaaaaaaaattgtgaagctactttgtaagtttctctttttaagatggtaacataatagaggttatagttaacagattctagatgagtgtttacttgggatggtttaagtgaagcagggatacaaagggaggcacagactactaggcatcttgtacaacagttgcttgctgaatgactacttgttttgagcgattttacttaaaatatttttattttaggtcaaccagatgtagtggtgaaagaagatgaagaatataaacgtgttgattttagcaaagttccaaagctgaagacagttttcyagaaagaaaatggttagtgttaagaaatgaagcataagaaaaaattgagccagtataccatatctagttcttagaattgcctaaggattttgaaaaagtaattctagaaaacatctagatgttatttaacattttcagtatatcaggctcatgtaaaattgttttggtagtttataccttcaatatataaatcccagggaagatatgtataacatgactatagaattcagtttttcatatgtagcagtctatgatagggtcttcattggcattgaaaaaaacagatttattgatataatttatataccataataacattcttctatttaaagtggtttggtagtttttaacattcatttatatttatctccaggtgattctagataagaataaatatctgatttgaaaaatatgtagtgagtacctgctatatattgaataaggaaagttagaccctggagacaaaaatattaactggtccctatgtttcaagagttgtagacgagcatttatccagtgccatcatgcatgtttgtgatgtttgagaaaactgttttatgtacacaaaaaggcattcttacattgtcttgcagttagctgtgtacatgtttcctgagggcaggaattgtctccacccatatttgtaatttctttaaacatttagcagcccaggcaataggtrtttgttgaattgaaccaaatacatttattgtgaaggaatgttttgacttcaacctcatttttgctttcaggcacagtaacagctgccaatgccagtacactgaatgatggagcagctgctctggttctcatgayggcagatgcagcgaagaggctcaatgttacaccactggcaagaayagtaggtaaggccaggcgaggtggctcacacctgtaatcccagcactttcggaggttgaggtgggaggattgcttgagccccggagttygaaatcagcctgggcaatatagtgagacttcgtctctacaaaaagttaaaaaattagctgagcatggtggcatgtgcctgtactaccatctactcgggaagctgaggtgggaggatgccttgagcccaggagtttgaggttgcagtgaactgagattgtaccactgcactccagcctgggtgacagagcgagaccctgtcttaaaaaaaaataaggtttctaaacatctataagctcttcatgaaattgagtttacttgttagatatagccaactccaatattaagtattactacctaggttgtacttgtggcagaatttaattgatacatatttcaattgagatagaagctcctttaatattttcattatactttatataagattaagctttaagggctgggcacagtggttcacgcctgtaaccccagcattttgggaggataaggcaggattgcttgaggcctggagtttgagaccagcctgggcaacacagtgagaccccacctctgaaagaaaaaaattagccaggtgtggtagcatgcctgtagtcccagttacgtaggaggctaaggctgacgatcatttgagcccaagatgtcaaagctgcagccagcctaggcaacagagcaagatcttgtctctttttctttttttttaaattaagctttaaaaaacttcctgtcctgtatgataaatagcagaaaataaagtacatgcattttccyacagaggcagctatgtaggaaaaaaagaatatgggattaggagtccagaaatacaaaatttacatgtgtggtgttttagtatttattaactctgtggccttgggcaagttctcaatgtccttaagccgatttttagctgcagaaatctgtcttgccttcttcctaaggacttaacagatgctattttgttactttataaaaagccttataacttcattttttttcttagcttagatcatggtttcttaacctcagcactattgacttttgcactaagtaattctttgttgtagggactgttctatgcattgtagatgtttagcagaatccttagtctttacccagtggcatctgaactattctgacaaccaaaaacatctctaggtggtgccaatgttcctagaggcaaatacccccaaactcccccccaatgaaaatcagtgtcttagattactggagtaattttataaagtgtagaatcctagaaaaggaagacatatatttacatatattaaaggggctaggaaatgtgcatttaatgggctaaacttggcttgtgcatattctatacagtaaaaaaaaaaagattttaacaacccccccccccctttttttaaacagcatttgctgacgctgctgtagaacctattgattttccaattgctcctgtatatgctscatctatggtgagaacaaagtgaggggcgataytccattatgctagcttctggtttgcttataccaaggttgcagtttttaagattttaaatgttatctgccaaagcagagagatagcttggtttcaaatcttcccatgtcttctcctgaaaagagtaagagcaacaaggataacaaacaaamaaaaaaaaataaagaacagctcacaaactacatcttcagtagaacaggtaaaactacacatctgaattacttgtaagtatcatacagaactcacacacctggtgtggtaaccacaaagcggagggaatgctggctgatggttccagatctagaatggaaagcaactagtcactccccaggagaggactccattctgaaagggaacagctggcagcaggtcttcagagtaaatagtaaaactagagacagaaaacctacatattccaaattgtcagtaagggctatccaagtctcagtgggaaattgctaagcagtcacaggaaaagaaagttttaggggttcagggttcttagaaatcttaagtaaatatttccttttgagagggcctcaccctgacagtaaacttctgtaagcacccagataaaaaaaattgcagaattttagtaaaatcagattctccccactgcccccaacccccgcaatgaaaaaaaaactgcagaatcagtaggaaacaagaatagagaagatcagaaacaaggggccagtggagtgatgatctgctcagagctagcagatctcagaaaatgaaaggaacacgcagcttctgaaagtgagtaacatcacgttggaaagcaagggtartaaacaattctggattctgaaggtagaataacttctgagagctacagacatagctatatatgggtaccatattttgttttgtgttgttggaacagtggaagctgtttgagctgtataggctagaaagctacccttagtccactagtagaagagaggaagatggaggaagagttccamgttaattttattatcgctcacaacaatcaaatttcttctgtaaagaaaaagggcactcactagtaatgttttagggcactcactagtaatgttttaaaaagtattagcatagggataatcactggcacaaatacaccttcctgcatagctgaggaactaccaaaacaaaacagatcatatagtgtaagattttaaataaatgacttacaatgaaactgcaacagatgtaaatatctgtggcccagataaccctacagtaacatttataaagcagaaactgcaggggatgcattaatatcactaatattagaaactaatatacctctttcattaacagtcaagaacatagaaatggctgggtgcagtggcgctcgcctgtaatcccagcgctttgggaggcagatcgcttgagcctgggaggtcaaggctgcagtgggccatgactgtgccattccacttcagcctgggtgacagagcaagaccctgtctcaaaataaatcaacaacaacaaaaaagaatatagaaccaagcaacacacaatcagtaaagcagagcttaagaatatataaagcattatgtgcccctaaatagaaaatgtaccttttcaaatatctgtggaaagaaaatcaaattttctgtcccctatgtcaaaacagacataatgcaaacaaaattctttgatataatggaataagatgagcaactaaaaatctgaaaatgggccgggtgcggtggctcacgcctgtaatcccagcactttgggaggctgaagtgagcagatcacctgaggtcaggagtttgagaccagcctggccaaacatggtgaaaccctgtctctactaaaaatacaaaaaattagctgggcatggtggtgggcatctgtaatcccagctactcaggaggctgagacaggagaactgcttgaacctgggaggcagaggttatagtgagccaagatggcgccattgcactccagcctgggagacagagcaagactgttggaaaaaaaaaaaatctgaaaatagagatccttccatctgaaaccaagaacttccatatttaaataacttatgtcaaactgtagtatttcaaggaaatgatgacagtaagttgtgattgctaattatttgaacatcatctgtcttttaaaaaatttaaggttcttaaagatgtgggattgaaaaaagaagatattgcaatgtgggaagtaaatgwagcctttagtctggttgtactagcaaacattaaaatgttggagattgatccccaaaaagtgaatatcaatggaggagctgtttctctgggacatccaattgggtaggtaaaaataataactatatctaggttaagagctgcctttgtgtttctagctaaacttaaaactgcttcataattcccattgctcttaagttttccttcctacccatctttcataaggcaaaaaccatttctgatagatggtatccaatactgaacagagacctgtcacatctgttatttgaaacctaataatgttttatgctgaagaagaaaaagtgtacatttagactttttaccccctttttctccttcctatttatttcattagctttagggtaccgtgggttttggttacatggatgaatttatagtggtgggggctgatttcagtgcacctgtcagtcacccaatatgtagtttatcccacatccctcttccattatactctactcttctatccattatactgttctgtacttttaaaagatctgtgacctggccaggcacggtggctcayrcctgtaatcctagcactttgggaggctgaggtgaacagatcacgaggtcaagagatagaggccatcctggccaacatggcgaaaccctgtctctactaaaaatacgaaaattagctgggtgtggtggtgcacgcctgtagtcccagctacttgggaggctgaggcaggagaatcgcttgaacccaggaggtggatgttgcagtgagctgagattctgccattgcactccagcctggcgacagagcgagactccatctcaaaaaatgatctaagatctgtgacccttcctgaaacaagtcctccaagttttagttttagaatagtagtagttaattcagcaagtagtagtggctagtaaggttttcaagaagttaaattggaatagaaacattttggttagtcataaattctgtacttcattaaagaagtaaatgctttcttaattttaggatgtctggagccaggattgttggtcatttgactcatgccttgaagcaaggagaatacggtcttgccagtatttgcaatggaggaggaggtgcttctgccatgctaattcagaagctgtagacaacctctgctatttaaggagacaaccctatgtgaccagaaggcctgctgtaatcagtgtgactactgtgggtcagcttatattcagataagctgtttcattttttattattttctatgttaacttttaaaaatcaaaatgatgaaatcccaaaacattttgaaattaaaaataaatttcttcttctgcttttttcttggtaaccttgaaaagtttgatacatttttgcattctgagtctatacttatcgaaatatggtagaaataccaatgtgtaatattagtgacttacataagtagctagaagtttccatttgtgagaacacatttatatttttgaggattgttaaaggtcaagtgaatgctctttataggtaatttacatttagtaaattacggtaaattaaattacttctctttacagtaagagttggctattctggacaaactagcagtgcttcatataatcactcaaaccacagtgtgtgcagcagtactagaaacaagacagaagcccatgtcctcagggtctagagtgggggcaatttcttataacctcaacattcagggttgggggaggtcaagcagaaaaccctggmgtttgggctctgaattactatagcagcatagagagtgggaagggaggtagaaactgatatgctgaatggatatataaaaaagggaacagatcaccacttccaatacacgacaatgcctgttcttaagcaggacagactgtaacagaagtatctcgcattgcattttatctgggaaaaaattaattaattaaaacgctacaggcaggggctatgcacactaccctcaattgcagctctgaagagggaaaactccccctcaggaagaggagggggcagtaaaggtcattgtgtacacattatctgttggcaaataatgtattgtagatcttttgaaggagcaaaatgacaatatatgggagaaatagattagattgctcttcagattcagaggaagagtagagtattttcaaaaacatctgtaatcatcaccaacttttgaggcttgttatgtgctttatatgtataaactcatttaattgtcacaaaaacttctaagagtgggtaccattattatccctcctttataaacaaggaaattgaggcatagagtagctaaataaattccaagggcaaaaagctggctaggattcaactccaagttagtcaagctccagagcccacgttcttaacttactatgctttagttaaatgcctttcaataattatctgccccgacttacaaaaacttctaactgaaccaggagctggataagatataggagaaaaggaaacccaaaacatgagaatacttcattgaagataagcagaaactaacattgcatccaaaggtcattgatctggaaaacatctgagaagtgctctgacaattctgggaaaaaatggaaaagagagaagaaacagagaatcaagtaagtaggttttttaatttgttttaaagagataaggtattgctctgtcgcctgggctggagtgcagtggcatgaccatagctcactgtaaccttgaactcctgggttctcaagtgatctgcctccctcagcctcctgagtagttaggactataggcacatgctaccatgcacagcttaaatggtgtttcctaaaaaaaaaaaaaaagatactctgaagcaataatttaatataacagaaaacataaagataatagaaaaactcagatttttaagtcctaagggggaagattttaaagagcattttttttttttcttttttgagacagagttttgcttcgtagctcaggctggaatgcagtggcacgatcttggctcactgcaacctccgctccctgggttcaagcgattctcgtgcctcagcctcctgagtatacaggcatgcgccaccaaacctagctattttattttcagtagagagaagagttttgccatgtaggcctggctggtctcgaactcctgacttcaggtgatccttctgcctcggcctcccgaagtgctgggattataggcatgagccaccacgcccagccctaaagagcatattttattggcaaaattaattagcagaaaatcatactaagacattctggagaaaatgtattaaattcctctaacatctagttagaaaaataggtagccacagttcttatttctattacattcaatccaagaaaacaagtgacaggacatctaactgtttttaatgaaacaaaataagatactaaaaggtgtgtctcaaacacagaaaagtttagaaaataaagtactctgatgtttcctccaaaaatgacaaaggtttaggcaagcccatggaatgaagaattaagaattcagttaggtgaaagtttctaattttttaaatgactgcttaaggactggctggggaagaaggaaaggtagtggttgaaggaaataaaaatgttttacctcaaattatatttatttgacatattttgagatggctatcagagggccagcaaacagaagtggtgctgcaaagctgtcttttttgaaagaaatctgcgtctatggagaatctccattaatgcagccaggacttcccttgtctggaatctagaaaaggttaaatgagagcctgtctgacacctttaaaggtcttaaacatttaacatccattctctcagaaagcttctaacaagaccacctttcctagccaggtctcctttccctacccgtaacctgtgttgccactaaaacctgatttaccaaaataacatgtttttggccatgctgggagctcacattacttctgtaacctgaagatggtataaagttcctacacctggccggacacaggggctcatgtctgtaatcctggcacttttgagaggcccagatgggcagctcacctgaggtaagaagttcgacagcagtctggccaacatggtgaaaccctgtctctactataaatacaaaaattagccggtcgtggtggcgcatgcctgtagtccctgcaactcaggaggctgaggtggaagaatcgcttcaacccaggaggcagaggttgcagtgagccaagatcacaccattggactctagcctgggcaacagagtgagactgtctcaaaaaaaaaaaaaaaaaaaaaagtttctacaccccactgggggcggggtcaggtctttgtctgaaggcccccatgtatacaacattaaataaatgtatattccttttctccaattaatctgccttttgcaaacagctttattttccagcaaaccttcagagggccaaggggaacttcaaggttacagtgaaatgatcctgccactgtactgggggacagagggagaccttgtctcttaaacaaagaaaagaaataccatttactttctggttctctattttttctcttcctttccattttttccccagaattttcagagcacttttcaaatgttttccagatcaccaacctttggatgcactacttaccttcagtgaagtattctaaaatatgttgagtttccttttttccttgtattttccttttttttcttgtgttttacacctacctcctggtttcccttggcctttacatggtgaaatatcggtaacatgttatctttatctgctaaataaaggtaaacgctagtaggacaagttctgagactgccctcacgggacttacaagaattgcatgctgggtcctggacagaaatatagttataactaggcactaaacaggctgcaccttggcccacttcctaaaccctcggggagagatttgaagtttcctccagtctcctcattcggtggccctgcaattaaacatctttctttgctgcagcccagggtcttacatactgacttgtcatgcacaatgggcaatggacctgttatggttacagttccatatcttaagttactataagacaacagctttaaaatccaataataaagtaaaaagaggctgggcgaggtggctcacgcctgtaatcccagcatttttggaggccgaggcaggtggatcatctgaggtcaggagttcgaagaccagcttggccaacatggagaaaacccgtctctactaaaagtacaaaattagccgggcgtggtcgtgcatacccgtaatcccagctacgtgggaggctgaggcaggagaatcgtttgggccagggaggtggaggttgtggtgagctgagatcatgccactgcactctagcctgggcaacaagagcgaaactctgtctcaaaaaaaaaaaaaaaaaaaaaaaaaaaaaaaagtaaaaagggttgcatgtatcataaattatgagaaggcagaaactgttaaaatggggaaagaactactttttatgatggtttactttgtacttttttttttggcagaaaaaaagccaaagctatgaccaagatataatgtttcatggattaaacaaaccttgtgaaaaaagtattaaagcaaagacaggattcaaacagtataagactgaatacatatcaaactttacctttctaaacaatacctatttcttttttaactttttttttgagatagggtcttgctctgttgcccaggttgtagtgcagtggcatggtctcatctcactgcagccttgacttcctgggctcaagtgatacacccacctcagcctccctggtagctaggaccacaggtgcatactaccatgcctggctaatttttggtagagatgggggtttcatcatgttgcccaggttggtctcgaactcctgggctcaagtgatctgcctgccttggcctcccaaagtgctgggattacaggtgtgagccaccatgcccagccaacattacctatttctaagcccccgtgcaacatttataaaacctgcaacttatcctgaccacaataataaaaattttaggcaaaaaagagcctggtatcatttattgtaaatagttatgtatgaatattaaaagtacttacccaaattttgctgaaagttgaaatcagaagcaaattcacagccttaaatgcttacatggtttaagaaggggaaaaaaaaatcagataactgtttattaatttaagttaaataaacatgcaaaaaggaccctgagaaagtaggaagcacaaagaataggctcctatacaactgttgaatctaagaagtgtttttgacagaaaaaagttaattgtatcttagagaacaaaagccaaaattaaaaaaaatgtgatatttgactcaggaaaaaaaaggtcaaagcctgaatagataatcagccaggaagaaatttaggagaaaaaaaaatggaaaactgcttaagcaaaaggctccaggcctagataatttagtagtgatttagtctcaaggaacagttatttctcattctaaataaactgttgcagaaaaaagaaataaaaaacagcatcagctataatagcaactagttcttaaagtgcttattatgttccaggcattaatctaagtgcttttacatatattgtacaatttaaacttcacactttagcactggtactatttattatccccaatattcaaataaactagaaaaagaaggaaaggtttaaaattcattttaaaaactggcataagtttgaaaccaatctcattaaaagtaaacttttcattgggtgtgttggtgtgcacttgtagtcccagctactcatgaagttgaggcaggaggatcctttgagcccagtagttcaaggctatagtgggctatgactgtgcccatgaacagccactgcactctagcctgggcaatatagcaagaccttgtctcaaaaacaaaaaccaaaaacatttaaataaaatattcacaaagcaaacttacttaaaataatcactaatataaaaagaaattcatgagttcaatgaaaatattttaattgatgcttaaacgtggcaattaagttgaacaggtacttctgatgtaaaatcgtaaaactctaccaacaaaagcaaacattatacttaataaaagcaaacattatacctaacattgccattaaaatggggaacaagacaatgaagcagactttgatcattattagttgcactggaagtgctaatatcagtgtagtaaaaataaataaaattggaaaataattatttacagataatacttcacaaattaaaaagtagcactggtaaatccattagtactaacagacttcactcagtatagaaaataaatagaactaaaatataaaagattttgggactggcacagtggctcacgcctgtaatcccagcacctcgggaggctgaggtgggtgaatcacctgaggtcaggagttcaagaccagcctggacaatatggtgaaaccctgtctctactaaaaatacaaaaattaactgggtgtggtggcgcacaactgtaatcccagctactgaggaggctcaggaaggagaattgcttgaacctgggaggcggaggttacagtcaccagagatgacaccaatgccctctggcctgggcgacagagtgagactatctcaaaaaaaaaaaaaaaaagattttcaacattaattaagacagtgtgttattagcacatcttaaagaaagcagaccaatggaacagcatagagtccagaaacaaacctacacatttaccagcttatgagaaaagtaactgtgcaatgtagttgggaaaggataatctttggtaataaatagtgtgggttaattgtatatcaatgtggaaaatcaattccagatagatggtcaaatcaaaatgaaataggttgaaccataacgctttcagaagaataacaagggagaatactcagacacctaacatccatccgaaaaaggacctgtatccagaatacagaaagaacacgtaaaaatcagtaagaaaaaggcagacacccaatactaaaatgggcaaaaaccttggactgtccacaaaagataacccaaatagtatttgaaaaggttttcaacttcattaaaaaaaaaacaaaacccaaaaaaccaacaccaaattaaaaccaaaacatataccaatacacaccactaaaatggctaaatgaaaatatctaacatcagaaataacacagagtatcgagaacttattatactgttgagtgcagcataagttgttacaaccattctggaaaatgaaaaaatctgaatgtctgaatatatgcaactgtgttccagcaaccctattcctaagtatttatccaactgagaagtgtaatgcattcataaaaaaatg

SEQ ID NO: 95880 - DNA, 16411 bp, Homo sapiens
gcacagaaccagggtggtgagcagaggacaggaaagggtcttagccacctccagttcacagatgagaacactgatgtctagagaggaaagagagctcctgggatgattccaagatgttctgttctccagttagaaactttgagtattcaccctggaacttgatatgagggtagcagtgtagtcagggggttggaagacgtatcaaaaagccaaatggttgaaaaagctaggggtgggcagagggaacatgaaaactgcctttcagcattttaaggatggccagtttgattctcatgtgcgccttcttaaagtgtggtaccaaatctgaacattatcgtccagctgatggatgggaaggatggcaagttttcagttcaatgcaaagaagagctctaccatggaactgacctcgaggaattgtcatgtgcatttttcccactctagcagctgggaggtgtagcactagaatttaggtctcctcatctaaggtcagaagaaaaaaagacaaaaccaaacgggaacataactaatagttaccgtttactgaacactcatatgtgccaagtccttaatttgaatcctcaccaacaaaggggccatttttcccctcattttttcaaagaggaaactgaagctcagagaggctgcgcatctagcccaaggtcatacatttcaccagtgaaggagttgagattggaacacagagctttctcctggtttccgggttaatcgcggattcctcctggttttcggaagcctgatggaagcaccagggtggagggtcagttcagggcccccccgtttccaggtgcctcgtggtcaggctgatctcctcgcctctctgcagggctaccagatccccaagggctggagcgtgatgtatagcatccgggacacgcacgagacggctgcggtgtaccgcagccctcccgaaggcttcgatccagagcgcttcggcgcagcgcgcgaagattcccggggcgcctccagccgcttccattacatcccgttcggcggcggtgcgcgcagctgcctcggccaggagctggcgcaagcsgtgctccagctgctagctgtggagctagtgcgcaccgcgcgctgggaactggccacacccgccttccccgccatgcagacggtgcccatcgtgcacccagtggacgggctgcggctctttttccaccccctcacgccttcggttgcggggaatgggctatgcctctgacatgcttgcgctctaggacacggcttggccggtggctatggcgcgcacgcagcgccacccatctgccgctccccattgtagcgtcgcgcgcccactctttcactcgttcaacaatctttcaacaaatgttcgccaaacgcggatgtgtgccggactcgaggaaggaggagggcgagccaccgctgccgcgccagagaagcatctaagcccatgggaagatgccttctgcgctccgcgcccagaggaaggaaaatgtcgtgggccaagcaggaatggagggaatagatagatccccacgaggtgctgcttggcttccccttcccgagccaatccagggagggtgcatggatgggggaaggcgaggtaggggtggcaggggagtgggaatattgcaactcggggacattgcagagacccgacgcacgcggtgggacctgcaacccttgtaaggaagcgggcacgccgtgggcgcaaccctggcctggctttgggccatagaaaaaacacgcagaggatgcctgacggaaggccctctggcagctggcgtctggcttcgtgcgccttggccactctgccggtctcggcggaaactagcaactgtgggcacttccaggctcgaaagggctcaaggtcaccggattctgctggccacttcttaaaaggaaaaattcctaccttaagaaggcatttactcttgtcatgtatacagaggagaataggcacaccaacacgtctccaacgctggattattttcatgggaggttgagacataattagagaggtttgagatatttgtaccaaaaataggaaggccaagaaataaagtgtcttgggagcggttgagtgaggaggctagggtttatctgggcagctgctccctggggggaaggcactggggtgcagggttggggaggccagggaaggacccaccccacagtacacccagagaggagctgggagctgggcagcctagggcctgggctgcccagacttctctctgagtataaccccggaagctgggctgtgaattgtctccaggtttcagggaccttatttttatttttatttttttgagacagggtcttcctctgtggcccaggctggagtgtagtggcacaaccagctcactgccacctctgcctctcgtgctcaagccatcctcccatctcagcctcccaagtagctgggactacaggcacgtgccacaacgcctagctatttttttttctatttttaatagagacggggggtttcaccatgtcacccaggctggtctcaaactcttgggcttaagcgaaccatctgccttggcttcccaaagtgctggggttagaggtgtgacccaccacaccctggagtcactcctttccagtgactccagtctagtccctgcgccctcacccctccctgccatttcagggccttctggttttacggcttcaccatcctctctatcacagagaagaaattgaggagcaatctaggtgaatgactcacctgagaagcccagcaataggctcctggactccccagccagtgctctcctccacccccatcccttcactcttctgccccaacctctgttcctgtggccatcaggtagggctgaacactttggcctccttttcatgataagccctagctagacttgaggactctctcaaccattccggtacagaggttccaaccagtgtttaaatcaaagccaaaagcctccatgtcatcattcccaacagcccacttcaatctgccacccagcttccaacagaccggggcagctggacataaggggtgagccagggaagtagctgcctaggcctgagctgaccccttagtgaaccagaagaaagccagtgccctcctgacctcatgcttaaggtggatcccagggccagaaggaagggggacacagcaggcacttacagggttggtagctccacagtacagcaagcccttccaacctgggctgacactgccataacccccacacagggcaattcatcacccattgtcagccaagggcctggtgccaggccctgagcttgggagacaccaggggcagcaaaggtggcaggacgtgggccygccctaagagtgctcttgcaaatgcagaggacagcctggcctgagaagcgtgggtttgggcgaggagaaggatgcaggcttcagggttgattgtgatttagagagaggagagaagaatggggtggggaccctcagaagcaaggctagttgagctggttccaagaagacctggttgacctgcattggggtctggactaactataagcctctgtagggatggctccagttttaattttccatgggtacatcatgctcagtaattttgagggatatcttagctcctgttttagtagctgcagattctctggggaaggagcagaggaggttccttccctcctgcacttgatatgctctggagggaggcagacaagaaataaactagcaaacaaaagggtaagaatatgtccagtggtgataatcgccgtcatggaaataaaacaggcctgtgatagtgtctggggctaaattaggctggatgggtggggggaaccttggaggaggtgacatttgactttggaaggaaccagccagcggtggcctgggggaggggtgccacatgcagagggaacagcaggtatagaactgtgagacaggaacgcacgttcagaaatgagaccgggggctgaaaggagaaaagcggaggtggactcctttgctgtgactccagtctagtccctgtaccctcaccccaccccaccagcaaaaaaaacaaaaaaacaaaaaaacaaaaaacccgactccccatccccgcctcttagcaatagggaggctgttttgtaaacatcttggaaacgagttgtttttcagtgaacccacccccctccccgcccaccaccacccacgaaagcttggcgagattcctagatcaaagttcctattggcctggtaatttattgaccccccaccccccgccctgcccccctacaagatgttctttaatgatcgttcactctcacatttaatcctttcctgccggacgcccccgccggcctcgatgtacagatagattaaaacgtttttttccctgcggcaatttccagcgtgcaggccccgctcatcttgtgacccggcttgagctgaacttggcgaggtggccccgcagagttcactcggatgtcacggtccggcctgcaggggtcacaggcgggtcaggcccgaggattgggaatgggccccaggtcacgtccccattcgtcggctttgcacaccggccggaggcgctgtccagaaaggggcggacccgggatttctgagaattacctccagcgcgattggcctggcttcctgcagtggccagaggttggttcgccgtgtttacagccaccaaatcgtttgccggagactgaaaccctgcccagagcctctgaaacactgggcaggttatggggaaacgctgaccccccgaaacactccctgtggcggcgactctggcttggagagtcgctaggattgtgcgggtccctccgacctctgcagatatttcctgatacctccgggtttggggactaccgcgagaagggcaacgcatttaaactctcaggagcagagttttccacctccaagggacgccttccaaggcgtgcggcgtgcttctgccagagacagtgttcagttttaaacaaatgcaggtcattctgtttcattttcggcgccgcaggtgcgttcagcgcccaaacccaggtagcgtgtgaccctgactggtcccgagccgggaagctccggcaggtggagagcagagagagcaggtgcgcgtcccgcagcgtctgagctccgggcattggcagctcagtagcagctgattgtagatgggcaaagtacagaagacttcccagtacggatcccttcacccctcccattaggggtcggtagagccctgagtttagggccgagcaccccctcacctggatgaggacagtggctttactctgggtgggacttgggagagaggaggaggactccagtgcccggtgtaccggacacccaggtaacgcagtctaccgtgcctggagctgggaagagtagttgcaaccggagcccccttttgggaactcactaccctgaggcttagacaggtcgggaatgatcgcctcccggttaaggaggaggaaacaggcacagtgatgtgtggtgacttgcccaaggtcacacgcagtacagatggagccgggcctcggagccaggactcctgggctccccttcctcttataccgtctctttatcctgccagggctaaggacccccttccctgctgtccagctggggcgccaagcagcagggccctccgaataggcgagctgtgcttggatctcagagacgggcaccgactgccgagccccagacgaagtgccccagggtcggggatcaggcttgtgcagggtagcacctggggacctgagggacctggaggccttcttgtatcctgaagtaggaccttctaagacttcatgagtcctggcccccttgcaggggttggggagctggggatcccagatctgcctattgcgcccgatgccccgaggctctctcttggactctggccctgagttcttctgcgcgatccttcggagacgtctggaggcctgctttatgcatctctcttggacctcagtttccccacacgtgggaggaggcagctggacgattcctgaaaggactttcccttgcttcctcatcacgtggaagagagcccacccggcacctggaaatggaaagccagtgaaggctgctttgggccggggcagcgggtgggaccgggcgggagggattccaaagagaccgccgggaaggctagagcttggaattccggctcctcggagtcctggccctcccccaccgccgcctcggagctcagcacaccttggatgggggaggcgggcagctcctagccccgcaccccaggaggcgcgctcggagggaagccgccaccgcgccgcctctgcctcggcgcggaacaaacggttaaagattttgggcagcgcctcgcggggggaggagccaggggcccaatccgcaattaaagatgaactttgggtgaactaattgtctgaccaaggtaacgtgggcagcaacctgggccgcctataaagcggcagcgccgtggggtttgaagcgctggcggcggcggcaggtggcgcgggaggtcgcggcgcgccatggggctcccggcgctgctggccagtgcgctctgcaccttcgtgctgccgctgctgctcttcctggctgcgatcaagctctgggacctgtactgcgtgagcggccgcgaccgcagttgtgccctcccattgccccccgggactatgggcttccccttctttggggaaaccttgcagatggtactgcaggtaagggagggtggggcgggacaggctgcttccccggagcccggcgcggctctgggcttctgctgaagtcggggtaggcgcccccgggaggcatgctattgcggctaggagcagggctggcgggagcgcggcgctccccggcgccccctcatgcccacttctctcctccgccttcctcccacagcggaggaagttcctgcagatgaagcgcaggaaatacggcttcatctacaagacgcatctgttcgggcggcccaccgtacgggtgatgggcgcggacaatgtgcggcgcatcttgctcggagagcaccggctggtgtcggtccactggccagcgtcggtgcgcaccattctgggatctggctgcctctctaacctgcacgactcctcgcacaagcagcgcaagaaggtgggggcaggaggcgacggctggacagggagggggaccccatttatgagcggaattccggctgatggatgctaggcgcgggctagcagcttgaggtgggctaggaccctctgccagctccaggttagctttcccagctcggagagtgccatgtgtctggcaggactgggggtgtctggaaggggacggcggtagacgagaggggcggatggaggcttttaacgctgtcccctcctcgggactcaggtgattatgcgggccttyagccgcgaggcactcgaatgctacgtgccggtgatcaccgaggaagtgggcagcagcctggagcagtggctgagctgcggcgagmgcggcctcctggtctaccccgaggtgaagcgcctcatgttccgaatcgccatgcgcatcctactgggctgcgaaccccaactggcgggcgacggggactccgagcagcagcttgtggaggccttcgaggaaatgacccgcaatctcttctcgctgcccatcgacgtgcccttcagcgggctgtaccgggtaagggcggcaaacgggctgcggactaggggcgcgggacctgggcgtctgctcaccgccgcgcgctctctgcgctcagggcatgaaggcgcggaacctcattcacgcgcgcatcgagcagaacattcgcgccaagatctgcgggctgcgggcatccgaggcgggccagggctgcaaagacgcgctgcagctgttgatcgagcactcgtgggagaggggagagcggctggacatgcaggtgagtrrcagcttcagaccaggcactgcggagtttggtcccctggctttccaagcgctgttcctggggcccccaaagcgcgcgcctggggcccagctttctggagtgggcggccggctcagactacagctatggaatcccgaaggaaggctgagacacccggtcaggagagctgcggaaggggctgcggcggaactgggagcatcccctagcctttccaggtttcaaagggaaagttggaatttgcaaaaatgttaataaagaaccttgcgattttaataaaactaagactttaactcaggagtttccggtagagcggggtcgtactcgccttactgctccagctgaactaaagggacgttgcattttgtttaaagatattgctttccttgactttctgtcagcaaaacatttagcccttctagtcttccctccagaactctcagttcgattctgagtaatccttctgtcaaaccgcaggcagacttgtgagaatgtgggtctcactctattcttaggcactaaagcaatcttcaaccgaactcctctttggaggacacgaaaccacggccagtgcagccacatctctgatcacttacctggggctctacccacatgttctccagaaagtgcgagaagagctgaagagtaaggtagggagactgggtctgggggtgtccttattagcttaggaaattcagctgctccctagccaacttccgaataagtcagtgtgctgccttcatggagtattttgaaagtgcagggcccagggctgcgtgggccagtgggcagaattagctttgtgaataaacaggatggagtcttgagctgtgagcccacttgggcagggtttgaccttgtattcctacccctcctccaccttttgctgaaccgtggagattctcagataggttccactttcttgaattggtgtgtccaagggcatacatagtgtgaatagctgattagtgtgggtggtggtggtgagtgtggggtgggggggcgtggggagaaacttggtccttctaactggtgagcagcattctcctgggattgtaaatagatagtggatttgggcaggcaaatggccattagctgctgtttccccctcccagtctctcccatcatggggccctttgggtttagtctccacttaagccctgtttacgtctgctgggctgattttattggagcacaaaataactgttcacctctgtatgactgttttgatagggtttactttgcaagagcaatcaagacaacaagttggacatggaaattttggaacaacttaaatacatcgggtgtgttattaaggagacccttcgactgaatcccccagttccaggagggtttcgggttgctctgaagacttttgaattaaatgtaagttaaaattctcttctttctcccttttgttgtggtttaaaaactcctctttcttccctatgctgtggctgcaattcttatgcttttgataattgttctgccctatatggagatatgtttcagcaacctggatccacctctctctttctacctctcccttgcttttagctcataatttcccccaaagatatcagtgactgctttttgttgttgaaagttaaattccagtttgtcagcccttggggtttcataatcttttgcagggataccagattcccaagggctggaatgttatctacagtatctgtgatactcatgatgtggcagagatcttcaccaacaaggaagaatttaatcctgaccgattcatgctgcctcacccagaggatgcatccaggttcagcttcattccatttggaggaggscttaggagctgtgtaggcaaagaatttgcaaaaattcttctcaaaatatttacagtggagctggccaggcattgtgactggcagcttctaaatggacctcctacaatgaaaaccagtcccaccgtgtatcctgtggacaatctccctgcaagattcacccatttccatggggaaatctgatgagcttgaatgttcaaacctgagacttattggaagtgtacatatgagtttttaaggagtgttgtgttgactttatatttaatttctaaatgtatattataatatttatgtgttttgactatactaccacaatctttaaatattaaaataatgaatttgtatcatttccaaataaagtaaaatttgaaggtacttttctggtattttaagattcctgttgggtaaaactcaccagtttagtattttcttagtgtatttaaccagattttacaatgcctacctggacttatttgtcatctttgcatctgttttctgtgagaagaaatcttagctgttttttatgttaacagttattagaaaatatatgtctgtgtgtgttattccagacgtatctctgtaaattcttctatagtcacttagattccctatttggaaaattgatccaagttaatttaatttttttttggtttgctgtactttagggaaagatgaacctgaaaaggtaacactgagaactgtcactctaacctctccagcttatctaacatgtcataaacataataaatctgtgttgtccaatagtgccagaactgttctctgaagttacggttttagataagacaaagccagtcactccagttatggacagctcttgactaaaatgagaccagaaatcattggygtgtcacctttacttagaagttgcatatggaaacagtattaggaaaggcgcatctctggttaagataagctgagcccaggttttctttattcaaaatgaggcaggaggagcagatttagcagactgacagataaagtttttatctatcccaggcaatagggtgtgagcctgacatgactgataaaatggcccagtcatgaccctgtgaaccttggctaacctccgtgaaagcgcagttttgtcacatttctgaccctggcatagccacagtctgaactgaaggccagactctcaatccagaaaggttagccccagtgacttgcttatgcaagcacatttttggttttggaatggcacaatctgctcactgaacctctgatgacttgtaggtttcaaactttacatttttcattacaattttagaatttggcaatactgcagaaaccaggtggtctaaataggtgtttgaaaagtgttctgtctacagttacatattctacctgactatagttttttaggtagaacttgggttgttcttattgttggactgctctgaattttaaaggatgtttatgtaataactcataatgccgttaaaaaatgagacatttcaggctatgtagtttcagccaaagctttagtgtactatagtgtgcagagatgactcttctacccctaacatttttcctggacatttccagctaggagcatgctagactgagggcataattatttcagataatttctacaaaggcatttttaaattttattttatttattttttgagacagagtctcactgtgtcacccaggctggagtgtagtggcacaatcttggctcactgcaacctccgcctcctgggttcaagcgattcacctgcctcagcctcccgagtagctgggattatatatgcacaccaccatgcccggctaatttttatatttttggtagagataggggttccaccatgttggccagggtggtcttgaacccctgacctcaggtgatccacccaccttggcctcccagagtgctgggattacaggcgtgagccactgcacccggcacaaagccattttaaaacagctttttttttttttttgaaacagccttgccctgtagcccaggctggagtgtagtggtacaatctcagctcactgcaacctccaccttccgggttcaagtgattcttgtgcctcagccacttgagtagctgacactacaggcgcatggcaccatgcctggctaatttttgtattttgggtagagatggggttctaccacattggccaggctggtctcgaactcctgacctcaagtgattcatccgccttggcctcccaaagtgctgggattacaggcatgagccactgtgccccatctaaaagagttttaatacttttcattcttctggaggacagctggcctttaaaacactatcttcgctgacttagtggctctgtttctctgcgaatgtagtgcagtcggaaatctgagccatcttaacatatcattcattttttaatctggggagcttcgaggaaagtgcttctggtttgcatttcccagggctagatttagcccaattatcctgatcagttacagagtagcaaagaattcatcttgaaaatacgttaaaaacacaatctttgatcatgtgctttgtgcagaggaaaggcagtctggaagcatgtgagcaaggctgctgtcttggacaatgggcctgggtcacatctctctgggtcaagtatgttttatggcacagtcacctctgggctggtgtccacgtgatggagaaatgatgtagatttggccaaaactgtggaaggaggggacatgacccctcttggactcactctggaaaatgacccttcgggctcctagcagcatggtgtagcrataggggtgctgtgctgtccagggctgctgcgggtgggcgaccaagctggtgccctctgcttccccttgcgcaatgcccttggcccttgctgcctcccatgttctcttcaatcaggactgtgttgccaccaaccacagaccactgtcaggactgagatgtgaaagcctgaggcttcagcattcagagggattggagcctttacctagcaaggtccttggaggcccagagacagactgtagttttcctggggccacacagggagtggcagaaccaggaaagacctccagatgccattttttttctttctttttttaaacagctaataacacttgcccgatttctaactcgctgttgccagacataatccaggggtctcaacttcctagcttccttttatgtcccctgctaccactcccgtgccagcacagatcaattctcttgcaggtccccagaggtggttggtgaaatgggagcgctgagaggaggtggctgctccccgagactccctgtctccggttggggtttcagtgctttttgcaccctgttactctccagagatccacaagggggcgggcttctcccttctatgccaggctcagaggccagtggttttccccaccagtgtccacgaattccagtgtacaagactctggcccagggcttgcttttaccccggacagtgagaagctacaggccacccagggcttagcaagtacttagcaccaggtctggtcaaggctgcctggcccctctggaaggggtcatcccaggctgggctgacctgcgcgtctttcagttcctgaagcagccgccaacccttggtggtctatggggtcagcggcccaggtttccagcattgcccccacactgcccacgtgtggcttatgttgctttcactctacctggaaaatcgctgtcagttttgagggagcagggagcacagtttccaaagaacgcgggcaaactaatcagccttcggatgaccgcaaccaggtgcgggagccaccgcacaaaagcacctagggaggaacgagggacgtatagggaggttgcggtggctcctttagacagtcaaagggctgctgtagtaaacacaggttcagacccgttctgagggacagagcatgctcttaggagggtaaagtaggagagagatgctggcgccatgtaaggaaaacattctgagacaactccagccctttggtgatgaaacaggctaccttgtgagagggagagagtgagctctctgtcaacagaggcagccaaatacaaagctggatacctaagccgccacagagatcaagacatggagggtgagcttgggttagatgaccccccatcccccttccaaaattaaacagttgtgaatctccgaaatgtgattctgtattaattcagttcctcagatacccactttgaaatgcctggggctgtggagatgggacatccccacgtcctattccggaggcattcagcagtctttggtgatcattctcccaaacctcagaggcagatgtggaagtgggagcccagatatgtgacctcagaaaggcaccaagtgccctgtgttgactgcccagggacctctcccctgccctgtgacttggtgtttcctgctccaggtcctgtgtctgctccaaccacccctagttcccccaacctgcccatgctgaccattcgcttgacctggcctctggggtcacatcctgcttccttccccagtcctccccgggtccccataatcccatgcactgacattgtcctctacccatcccagctgtcctttgtctccacctcctgaaatgtgctgggaggcaggaactgtgtctcattgttctaatcttatacatttagtccattttcacatacctctccagcctcccctggaatgtacatgtagtaggtgttctctggaagaaatacttcttggggccaattgacaccatttaccttatgtttctccagcttacatggtgccatgtttttctttgaaaagtgaaactttcatccttgaaaaatctcagcggccgcaagcatacacggctgtggtttaacagcatgtcacattcctgaaaccgacgctccacgggtatttgaccaaacaagctttccttcctttgaagtagagtcaactcgagttagaaccctgagacagggatgaagattcagcctgggactgcatggtgggttttctgggtgagacatatcatgttgcaatattcataaccacgcaccctcagcacagaagctgccccacactgtaagatttctcactgctgctgagccctccctggtacgttgaggagttagaaacctgttcacgcctttaggatggtagatgcttcaggatttttgtttgtttgttttgttttgttttttttgagatggagtctcactctgtcgccaggctggagtgcagtggcacgatctcagctcacagcaacctccacctcccaggttcaagcgattctcctgcctcaacctccccagtagctgggactacagggacgctccaccacgcccagctaatttttgtatttttagtagagatgggatttcgccatgttaagaaggatggtctcaatctcttgacatcgtgatccacccgcctcggcctcccagagtgctgggattacaggcgtgagccacagcgccgggccctgcttcaagatttttatctgaagtcactaatgggttcacttaaatgcattgtgaaaagaggaccaggtgctttgcttataatagacatgtgacaaaacaaatttgttaagtacagccaaatcaattcattgactggttcgttaagtacagccatattgtccaacacaacaatcacttaatgatagatgggggcattcagtattccaaaattgaaagttcatttaatgtcaggtagtcacagacttttagggccgtaaaggaggacaggtcatctggcccctcagtttacacctgagaaacccgaggttgaaagaaattttaggttacaacagagaatgtgcccagcacactgtaggacttgaccctgctctcagttaaaaaaaaaaaaaaatcaactgtattgtttacttatatacgtgtcagggaaaaaaatgcaggttagcagactatttgagaccaaatagttcttatttgtcatgatactgctgagagtgtgtggactctgggaggtgttttgagaacctggaattttgtggcctcagagaatttgacacaaaacctggcggaaggtacagattgctggcatttatggtggatgtgggggctgaggtcttcacgttggtagagctggactttcagatcgtttgagccccttctactaaacagcagaaaatgggttttaaaggcaaaagcacttacttatgagaaacaggggttcttagactttatgaggcatcagaatcatccagagggctggcttaaacaaagatgattgcccactccagagtttctgggttgacccaagaatttgcatttctaccaagttcccaggtaatgctgatgctgttggtccggggaccatactttgagtaccattggtgtaaaggcttctcatccgtgagtcaaggatcacagacttaggagggctggcagataatattaacaagtaatgttagccaggtggagagacagtaggatatggtgggcgtgctgctgatgtggggaccacaggttccctctaaagtgggcagttgctgctcagtgctgacctactcttgacctacaggaatgaagaactcggtttgaaactctttcggtgtttcaggaagtgctagaaatccaggtttacataaggaatgtgtaatgggaatatcctgttttttagatgttggtggctaattacctttttaaaaactgtgcaggcaaaataaaacttgtttgtggccctgcyggtgtccagtttgcaacttcttgggtcttcgatctttggagaatttttagagtgcttgatcaaaagtggcttagctgagtgggtctgtttcagagtctctcataa

SEQ ID NO: 95881 - DNA, 65424 bp, Homo sapiens
  misc_feature (1)...(65424): n = A,T,C or G
ggctgttattaaaaagtcaaaaaatagcagatgttggtaaggttgtggagaaaaaggaacactcatatgctgttggtgggattgtaaattggttcagtccctgcggaaaacagtgttgagatttctcaaagaactaacaatagaactcccatttgacccagcaatcccattactgggtgtctatccagtagaaacccaaaagaaaatagatcatgctacctaaaagacacctgcactcacaagtttatcacagcactattcacaatagcaaagacatggaatcaacccaggtgcccatcagcggtgaactgggtaaagaaaatgtggtacatatgcaccaatggaatactatgcagccatacaaaaaacaaaatcatgtcctatgcagcaacatggatgcagctggaggccattatcctaagtgaattaatgcaggwacagaaaaccaaataccacatgttcttacttataagtgagagctaaacattgagtatacatggacacaatgatgggaacaataggcactggggcctccacaaggacaaaggaaagggttgaaaaactacgtattgagtactatgctccctatctgggtgatgggttcaactgaagctcaaacctcagcatcatgcaatatacccatataaaaacctacacgtgtaccacctgaatcagacattttaaaaaataaaatatgttattttctgaaattgattttgtttttttcagtgcctagtagcagacagccaataagagacacaaagatcttgctaacactggcaagaagctctgcaaagaactatcccaagaggaagagctatggaaatcacaggacttcatcaagaacaagaaagaaagaaaaggctattggtgtgtgtgctaaaaggaggcttctaatattacccatttaaaaatctttgataaaatgtcatttgtcttagttcaggtggctataacaaagtgtcatagaaggagtggctcatagttctggaagctggaggtctgaggtcagggtgccagcatggtcaggttcagtgatggccatcttcctcttccaggtcacagacagccatcttctcctggtatcctcacatggaagaaagagggctggagagctctctgggggccctttaataagggcactaataccacttgtgagggttccatcctcatgacctagtcacatcctgaaggccataccgtctaataccatcacattagaggttaggatttcaacagatgagttttaggggaatacaaacgttcagtccataacttcgctcaacactcaaagtagttaacagtgaccccttctcttgtgtgctttttctaactaatcaattgcctcgtcctgtcaattgtcatgacacatttgctggattgtgtctcacatttgtccttttctttttcattcccaagcaacttcacccatagactgcagagataacctcaaaatctttgtttatgaatgacttaatttctttattacataaagtatatatgttcattgtagatgctttacaaaaatcaggtaagcaaaaaagaagaaaaaaattaatgtcttgaatcccaccactttgaaataactttttttttctgagataggttcttgttcagtcgcccaggttggagtgcggtggtgcgatcacagctccctgcagcctctacctcctgatctcaagccatccccccatctcagtcccagtctcagctgagactacaggcatgtgccaccaagcccagctaatttttgtaattttttgtagggcggggtttcaccatgttgcctaggctgctgtcagactcctgagttcaagtaatttgcctgtctcggcctcccaaagtgctgggattataggcatgagccactgtgtcctgccttgaaataatttcacttaatattttggtatatatacctctgtctgtgcatattaatggaattatgctgcaatactgtttgtaattaactgcatatcataaatattttttcatgtcaatagactttaacaatattattaggttggtacaaaagtaattgcggtttttgccactaaaagtaatggggaaaatcgctattatttttgtaccaacctaatagctgcgtagctttctattttacagatctaataccatttatttactcaacctcctactattaagtgtctaggctatttctgatcttttacttttatacccacactcatggtaagcacccttgcaactatattaatcacatacattcttaattatttctctaagatgaattcataaaagcagaattgtggggtcaaagcctatacacatttttaggttgtttgataataagccaaatgcaataaagtatcttaatctgtatcccaatgtccagtattctgttttcctccaacttatcttcctccttaagtttgtaaagaagaacactaataatgttgcctcccacttcaaaaattgtccaggattcaaaatcctcagtctaggctttgaagcccttctaatctgggcccggcccaccttttcagggtcacctctcactgtcctccctgtattaccctacaccccatgctattgcttctgaacactcttgatttctaccctgtcttcagccacactagatatgatccctttcgtgaactccgatagccatgtacacgtgcctcacttccagcattaattgtattctgttctatgtctcatgggctttttacgcactagtcttacctcccttcccacaccacaagtgcttgtaatgctgggaccaccccctgagtccccgacagtagaagtgtaactgtcagaattgtcttggtgatgctgcagtaacaacaaccctcaggtctccgaggctgaaaacaagacaagtttatttctcatcatgctacatgtccatctcgggtcatccaggggcctctgttacatgacatcctcactctgggattcaggggccctttcatctgaaactgatgtggcagcagagggaacagagacctggagagcctcccgttggcaattaattgttcctgtctgaaagtgatatttctgcccacaaaccatttgttaaaatcagtcacatggctgtaccagagggaggaagagtaatcttcccatgtaactgggagaaggaaacaatcatataatataaggggaacttgaagtctctatcacaatagctagaatggtgccttgcttgtaacagacaatcaatagacaaatgttgaaagaatgaacaaatgaggccaggtgaagtggctcacacctgtaatcccagcactttgggaggccaaggagggcagattacctaaagagttcgagaccagcctggccaacatggtgaaaccttgtctctactaaaaatacaaaaaaattagccaggtatggtggcatgcacctgtaatcccagctactccggaggctgaggcaagagattcgcttgaacccgggaggcggaggttgcagtaagccaagatcgcgcctgggcaatagagggagactccatctcaaaaaaacaaaaaagaaagaaagaatgaacaaatgaatgaatctctaactagttataaaaacaaaagaatgctgactataataggatgtttctttttcaaattaatattcacttttataagattatgaaagatgggccgggcacggtggctcatacctgtaatcccagcactttgggaggccgaggcgggtggatcacgaggtcaggagatcaagatcatcctggctaacacagtgaaaccccgtctctactaaaaatacaaaaaattagccgggcatggtggcaggagcctgtagtcccagctactcgggaggctgaggcaggagaatggcatgaacccaggaggcagaggttgcagtgagccgagatcgcaccactgcactctagcctgggcaatagagcaagactctgtctcaaaaaaaaaaaaaaaaagattatgaaagttgaacatatatgggcattttgttttttctttttctattaagtataagtctgtatatgaaatgcaaatatgtgtttttccctctctgtttcaagagggaaggatgaaaccaggaaatcgtgagcacaccacatacttacaggagaagtaggaactgtaccatgagtcacacaaaataactaggtaaaaaagagtgtccaaaattgttagataaggaagatggtcccataggaggggtgactcagttgactcaactctctcctgggaaatacacttctgcattatcctatttataataacagggtgttatgaagtaaatagtcacccaaagaggaacctcctgagagtagagttgagtgtgacataggacagtccaagaaaatatgtgcacctgacaaggtgctttgaggtagcaggtgaagctcaatcacaagaagtggcataactcaacaaatgactctttctgtacccctgggaaaaccatgtttcccaccaagaatctctcaattcatgacagggaatgtgcaacctcaacggatctctctttcttttgtgactattaagattactatctctcaggctgacacaggtggatcacctgaggttgggagttcaagactagcctggccaacatggtgaaaccccatctctaccaaaaatacaaaaattagctgggcgtggtggcacccacctgtagtcccagctactcgggaggctgaggcaggagaatcacttgaacctaggagacggaggttgcagtgagctgagatcgcaccactgcactccagcctggcaatagagcgagactcagtctcaaaaaaaaaaaaaaaaaaaaagaaaaagattactatctagagaggtaaatcttagagaactcaatgaaactcatagggtttctatttttgaagcaaacttaaatgtgggtgtaacaataatttttagagtcactgtaacatgtgtgtgttttccacttaagagaatttgtcatattaggtttgtagctttattgaagtgtttaaaacaccttgactaagtttgaaaccaacatttaagtatcgaaggcaattggttcatgaattaatagtttgaattattagttgcataatagtgtttaaatatttgaggaaatgtgtttaatagatgtaaaagcttagtaaagtgaacattaaacaaaactaagtagtggtaagtgttctttctatgccagtagcccctgagacgttaaggatcctagcaacagacaagatatctatcatctagtagatttagtagactgtatgttgtagcaaaatcgcatgacctctggctattactattgaaaacaaaatcctaactaagatacttagcagaaaaacccagccagcaactatgtaggttaccttttgtaattacagtctctcgacaagggttattattcaattcatgacttgattaggtttggatcattggcaaatattttgctatgttcacctctttagtaataagcttgaggtttactcctttaaaacacttctgaggtcaagctttctgaagtgacagggattgagaggtgaaggttctagagaaagaggaggccaagcaaccttggtgatcaaaagacttttaagaaaaggaaagattaatattcacctttatgttgcagtgatgcaaactgttccatatctcccagatgttcattacagttgctatataaacaaaaaaaatccaagcacttccgaggtctaaatagttttacttcctatagctatcatacaagaacgattcaaagtgccaattgttgccaatgtcgtgtcattcatggatatgtcagtgattcttccttgctgtggacagcagccgacattcagttatttttctggaatagacacctcagcttgctacttgctgggctgatctaagatactctgaagattcgctagggacttatgagctactaatgctcagggatttagtgtcctgaagaactctttaatcctgtgcttcctgaatcccaccctaagccagggccttctgtcacatcccaagagttacaggcagtttgaaagctctgctttctgcttgacctttggaagtcctatgagggaccatttacggtttcctcagtaatttccaccaggatgaatttccttctcatcactctgcctcaggtagtgctctgaaggtcgtcctttctgaacaaacgcagcaaagcaagccacaccatgggtgagatcaaccaagttgccgtggagaaatacctggaggagaaccctcagtttgccaaggagtactttgacaggaagttgcgggtggaggtgctgggagaaatcttcaagaacagccaggtgccagtccagtccagcatgtccttctctgagctgacccaggtggaggagtcagccctgtgcttggagctgctgtggaycgtgcaggaggaggggggcaccccagagcagggggttcacagggccctrcagaggctggcccacctgctccaggctgaycgctgcagcatgttcctgtgccggtcccggaacggcatacctgaggtggcctctaggttgctggatgtcacccccacctccaagtttgaggacaacctggtgggccctgacaaagaagttgtgtttccattggacattgggatagtgggttgggctgctcacacgaagaaaactcataatgtcccagatgtgaaaaaggtaggtggccttatgacagtggggcagaggtcttggcagggtcagggaggaacaaatgggaaagagagatagtgctatccttgtggcattagtttggcaataaccgggggaatgtgggtggcagggaagaggatcacccaggcctagtgttgccaaatttagcaaatgaaatttcaagttgcccagttgaacttgaatttcagataaacaatgaattattattttctgaagtataagtatgtcccatgtaaagtttggcattttatcaggtgatcctacctggccctggtgcattccacacaccctcccttacgcctcctccwgtgctctkggggactttccttctcagcaacaccagcaaaacaaactaccccactagggagatgggccaacgtgcccagatgccaagacttgtgaactgctccccatgcctctcattcacagtccttcgaaaacattcaggttttttggatggatttgctagtaaatcaattctttcatctatcgaccaaatgtgcaaagagaaaaaatgatgccatttgaaagttcagatgttcaaatttggaattcattacatatgtgaatttaggtgatggttaagtgcaattgaccactcccactgctccataacccagatctttcaagaatgaattccaatcaagtaagtgggacatttggaccctcttgaagaccaacagcatactgcacaaatacaaggcattgagatgccccttatagaaatagaaaaactttattcttaccattagagtacatgttcatttttaaacaattataagatacaaataaaccagaggaggaaatgctaatcacccatcatccctcccctcagcaataatcaagggtaccagcttggagattctcctggcagctccttctctacacatgtggtccattattacagtttaccattaacaaaaagggaaaagtggattatgatggaacagagttgaatgggaacaacttgtgaaatgctttctgtgcaggggtgtatagggcagctggagaggcaggaggataatctcctaaatgcctcctgaagctgattatagggggagggtcacacggacccaagaggtgtggaagtcatcaaacacgagtgactctctgcaaacaaccacagaacaccgctcaggtgcaagggttaccatggggcctggtagggcttcagtcctgaataattcctcctttcagtaagtttaagctgggttaagtttgcttttgagcctgactgcagctgcttcaagtgtctaaatggatgctcatccttagggcaaagttctctagacaaccaactggaaggcaatgtctgcacatcctgaggtttttctcatgggaatacgctccttgagggtccccaactgagcccatccctgctagcacatcaaacttgaaaaagtgacattcagcaattttttgaaaggcttttaaagaagagatgggtaaaatgatttctgctgttrtactttgattagcccagttctctgtngtgagaaggaaataagagcatggagctgcttggaggtggttttggtctgcggctgtccatggtgagcatcacggcatggacggagcacttcatctgggagtggggagtctctcctctcttctctggaggactcctggctgttctgggtgggacacagagaaatgtgtgttgaagacagatacggttctgtgctcacgagaaagagacctcattggttcttcatttcaactgcttcttcacatttttttctctctagagtggggattccaactctggctgtacattaaaaccatattaagctgtgtgcagtggctcacgcctgtaatcccagcattttgggaggccacggcgggtggatggcttaagcccaggagttcgagaccaggctggccaacatgggaaacccccgtctctaccaaaaatacaaaaataagccaggcatggtggtgtgtgcctggagtcccagctacttggaaggttgagatgggaggatggcctgagtctgggaggccaaggctgcagtgagctgtgttcacacactgcactccagcctgggtgacagaatgaaaccctgtctcaaaaaataaacacaatccacaaaaccatattggtggctttattgttacagcggactctcaaagattagaattcaggcattagtatttttattttattatttatttatttttgagacagtcttgctccatcacccaggctggagtgcgatggcgctatcttggctcactgcaacctctgcctcccgggttcaagcaattatcctgcctcagcatcctgagtagctgggactacagaggtgcrccactatgcctggctaatttttgtatttttagtagaaacggggtttcaccatgttggccaggctggtactgaactcctgacctcaggtgatcmacctgtctcggactttcaaagtgctgggattacaggcgtgagccactgcgcccggcccaggcattggtatttttaaaaagctcccccagctacttctaatatgcagccaatgttgaaaaccactggtctcttgggtaagcagatacaggaggaggaagtgaatttcaaatcagctgtggaatattagagatggaaggggcttatgaagtctttagcccaactctgtcctatggaggacaggaagttgaggccataggagttgtatatcccccgggtccatggtgtgtgtctgtggatgaggagggttggaacggaggtggctgagtatgtgtccagtgctgtttgcctaccttacacccctgcagtttcacttgctttagccgctgcagtaagatttgcaacgggaaaggaagtagaaaccaatgtttcaaatgaaatatctgattaattcttcctcttttcattgcacttgacaatttaaacaacattctctgacaagggtcatatttttatttccagcctgtgtagtaggaatcgttcaaagttaggtagacaggaagtggcagatctggggcaataactcaggtcttggaggcctccctctttctaccatatccctgaccacacacaactttcctctggctagcagtgtgggcgcaggtgagggaaagacttctcacacctagacaaaggtacagaactacatactcccaaccttggagggtccatgaaggtaacagggaagccactagtatagggagagggctgtggcatcagacagacctgggtgaagatccatgtctgtgacgtagtaactgtgtgatggagtttctacccctaagaaatggagataagcaaatgtacagattaaatgtatataaaggacctgactcatagtagatgctcaataaatgatagctgtgataatattgtcattatgccagtaggcgtttaggagctggatatggttggccaaaaaatggtcaatgattattgcctgttttaaaacaagttgaaggcaggaagacttttttttttttttttttttgagacggagtctcgctctgtcacaaggctggagtgcaatggcttgatctcggctcactgcaacctctgcctcccaagttagagccattctcctgcctcagcctccccagtagctgggattacaggcatgcaccaccatgcccagctaatttttgtatttttagtagagacagggtttcaccatgttggccaggctcgtcttgaacttctgacctcgtgatctgcccacataggcctcccaaagtgctgagaggaagacttttaagaacaggaaactgagagatatcctctttaagttgtttttttctctattcggaaagctgtccataaactatgggtgatcctgattctgactgtggtttaaaagtcctccttcctctctcttcctttcctcctctacttctgctttggatctcaggggttaagggtgtttaatcaggatttagcaatactgacatctgatgagggatcaggcctcctgttgctctaaacaatgttctccagctgccttcaagggcttctctgaagaaccatcaagggacacacgcaggatttatgcaaagaaacttcgctaaggawtttttgagctagtgaaaataaaacacaaaaacccctcccccatccccatcctgtaacttaatggctggtttatctagggctttcagatgcaataataagcaagtatcaaattttgaaacttacaagccattttctcaaaacagtccattgaacttaacatttccttgtgtttagaatctggaataaaatggcattaagtttgaagctgcagagtgaaatgtgtttgcaaagaagtgctgccagctaagcatggtggcttacacctgtaatctcagcactttgggaagctgaggtgggcagatcacctgaggtcaggagtttgtgaccagcctggccaacacagtgaaaacctgtccctactaaaaatacaaaaattagccaggtgtggtggcaggtgtctgtaatcccagctacttaggaggctgaggcaggagaatcacttgaacctgraaggtgaagcctgcagtgatcagagatcacgccattgcactctagcctgggcaacgagagcaaaactctgtctcaaaaaaaagaaagaaagaagtcctggctaacttcaccccatggtgcacatttctggtatttcgatgattcctttagtgcccaggctgtgtaaatgaaggtgatgtgatctgcatggataacagggtggaagggaaacaatgggagctggcctagacaagcagtggattaagagaaagaatctaacaaaaactgcagacactttggtctgagggtgaagatgctatggggaaccagagagaggtaacagataaaatggatagaaaagaaatgtggttcttggtggcatgagtgagggagtgtgctggccttctggaggaagggtgctccgcggtatgggaggcctacatccagctatgggcatctgatttcttcagtgatttgaattggctagaaaaattaaaactagaagcaaaatggtaattgcaaaagaactacttctcattcaggaaagcctagaaaagtactaagtttctcttcctagtacttactgaatactatgtgccagacactctttttttttctaagtgctcagcctatactatgttattctatcttcacatcaggaattctaggcagtagatggaagcattacccctattttcagattacaaaacgaggacacagaaggtaagtaacacgcccaggaccatacagctagtacactggggcccagtttcagccaagaaagtctgactccaataccttccttgcctttatgcaatgctgatgcctcaagagttggtttgtgtgtttccactttgggaaaggtatagaagagatctggagtgaggggctgcctttatcccctttacatcacatatttcctctgagagcggtaccatttctggtgatcctctgcaggagtgattccccattgggttgagcctaagaattacctgggccacgtaaaagtgcaggttccactgtaggagattaggattcagtgcatctgctgcattaatctgcaggtgattctgaggcatatctcaggactgctaatctcatttgagctctrtgagttctattggccaaccagcccttgttccctggtggaaactctggcctggaaatgacacacccagaaaattctcacatttttttctacgggaaaccagacagaatccagtctgcaaggtttgtgctgcttttagaagcactgccaacacagggaaatgaaaataatacaactgtggaaggaataccgcactaattttggccaacgagtctcagagttaaggctgaagttcagttctaattgaagaagtcctaggttcaaagggaagaatgtcatgacccaaggaaggctgggtctaaacccaccgtgagtggctattctctgaaatgataactaataagataattgccttccttgacctttttctcaagcccttccatttgtgcgcttctccagactcattactcagcctctgctatggccagtggattagaattatctctcgaatctactctatgaggtctgaatctgggaagatccactttcctctctcccagagaaagaaaaaaaaataggaatggaagacataagcctggtagaacattaaaaacctgataagcatctgatgctggcaagagggtagtccttggtcctttcacacagggtcagtggaagttagaatgtgaacctttctttttctttttcttttttttgagatagagttttgctcttgttgcccaggctggagtacaatggcrcgatcttggcttactgcaacctctgtctcccgggttcaagcgactcccctgcctcagcctcctgagtagcggagattacaggggcgtgccaccacgcttggctagtttttgtattttagtagagacagggtttcatcatgttggccaggctggtctcgaactcctaacctcaggtgatccgcctgccttggcctcccaaagtgctgggattacaggcrtgaaccaccccgcccagcctcagaatgtgaacctttcatcaaagtaatctatgtaaagaaaaactgtatgttcctgtggmtccagcaaaagggatttccttttttgggaatctgtcacataaaaataaaagcaagaaggattagtgcagtattgttggtagtggggaaaactatacacaggcaaaatcagtaaaggacagttgagtggatcataaagcacccagggtggagtagtgtgcacaaatctaagaggtgagttcacatccatatgcattggtcttcagggaagtccctaagacattgttaagtgatgaaactattataagcaattagaaaaggaaattttagaaaaaatagaaaactctttgttcaagcatggagaaaggcataggagacacaccagcagttagcacggatttcttctagtaggctagattggaaggaactgggggcaatgataatttttgctttatgttatgacatatgggttgatgatttcaagtgcatgttttccctttgtaatgagagagaagcgctctatgaactgtgtctgtattcctagctgtgctctccttccctgcatgtacttgctgtctattgtaaccttgtgccttyccctctcttcctcttagcacctcactttccacttggctgtctgatcacctcttttcttctggcccaacctcagcctaacctaaataggccatagctcaggttggcagcgcttattctgaaatgggcaattccattctatgcagtcataggatggcaggtggagtgggattgtttactggggaccactgtactggagccctggttatctgttggtagcatttaaatgagagagaatgatctgtcatcatccctagatctaccactctatgattttgtgccactttgacaaatatgtgactgtctctttcagaacagccatttttctgacttcatggacaagcaaactgggtatgtcactaagaacctgctggcaaccccgatcgtggtgggcaaggaggttcttgctgtgatcatggcagttaacaaagtaaatgcatctgaattttccaaacaggatgaagaggtaatgctaaccctgggcatctggttggaggctcaggaaatttatttgttgtataaccaaagaaaagatgtcacaaccataacttgttattctctgccgtctgtaggtcttttccaaatacctcaactttgtgtctatcatcctaaggcttcatcacaccagctacatgtacaatattgaatcccgaagaagccaggtaaaaggaaggcagcattagtcattccatgctgacctattctgacaaagccrcccagagacaacaaattcagacccctcctattcctcctgggggtgtaagccacgtggaacagatccccaaacttcagtcccacgtgtcctctcatgatcttcccgccactctccccacacacactcccctgcaccccaagctctccaattgtgtacacaactggcttggctttcttcartctagatcccgagtggacttggcatttctgtctatgagatggtgatgacaataatggtacctacttcagatggttgttgtgactattagcgattagctctcaaataaagtttgtagaaattcctgggtcatagtaaacctattaatttgaggagcatattattcctaactccatgagacagagggataaagggcactattagtacctaagatacctaggtctggcccactctctggacctcagtttcctcaccagtacaatgcacgagtagaggttgagagggaggtyccttcccgtttgaactctccaggtaaggttacctctgactatctcaggatgcatggaaggaggtatgtggctctctccacatcagggccagcaggagccagtgggccaccratactggattctccgtccagggaccatccctgcatcccatttcagggcacttcccctttggagccaaaacatctagacacaggaaccaatcatagcttctctctctccatagacccgcagccttgcaaaagtctactcatcatctcacctagaggatctgagtagtttgttggatgtacacatgttcaaaatcagaattgcactttccaatgatatgcatttattttatttgatgcacctyatgttttcttgtggtgaatgctctatctctccatagcatactttattctaactgttttctttttgatacctactttcagatccttatgtggtcagccaataaagtatttgaagaactcacagatgttgagcgacagtttcacaaagcgctctacacggttagawcatatctgaactgtgaacgatactccattggactgctggacatgaccaaggagaaggttcttattattytacacattttgtctcatctcacatcgcctatataacacacaccacaggaaatgtgatccttaaaaaacagatacactatgtaaataattagtcatgattgatgacaagaacagaggtaaaagtgtgtgtcttggagcaaaaaagatgtaggcttgaatcttggtttttccacttcctagtaatatgggttttcagcaagtctgttttttttttacattaattaatagactatttttagagtagtattgacagaaaaattgattataaagtacggagtttcctcttccctcccaatctcctctcccagtttccctgttattaatatcttgcattagtgtggtgtgatgaatcaatattgatatattattattaactaaagtccatagtttacatgagggttcatcctttgtgcagttctctgggttttgacaaatgtgtaatgtcatatatctgctactacagtatcagacagactactttcagtgcctcaaagccctctgtgcttcacatattcaacctttcctcaccccttccaaactcctggtagccacaggttttttttkgkttttttttttgttgtttttttttttttgctgtttctatagtttttgccttttccagaatgccatatagttggaatcatacagtatgtagcttttcagactggcttttcactttgaaatatgcatttaagtttcctccatgtcttttcatgactcagtagctaatttctttttatcactgaataatattccactgtatggcaggtttgtgtatccattcacctgttgaagggtatcttggttgcttctaatatttagtgattgtgaataaagctgctataaccattgtaggtaggtttatgtgtgtctacatgttttcaactcaattgggtaaataccgaatagggcaattgctggattatactgtaagacaaattgatctttgtaagaaactggcagactgtcttccaaagtgactttactgttttgcatgtctaccagatgcactttctcaccagcagttgttaatgtcagtattttgggtattagcagttgctgatgttagtatttggggtatcagttgtggtatctcattgttgttttaattttcagttccccaatgacatatgatgttgagcatcttctcatatgtttacttgccatctgtatatcttcttagagagatagctgctcagattttttgcccacatttttttatgttgttttcttatcattcaattgtaagagttatttgtatattatgggtccaagtcctttaccaaatatgtgatttgcaaatactttctcccagtctgtggcttatcttttcattctcttaacagtgtctgctgcagagcagaaggttttaattttaatgaagtccaatttttctatattttttctttcatggattgtgcttttggtgytgtatctatgaagcctcatcaaacccaagttcacctagatcttctatgtcatctcctagaatttttatacttttgtgttttacatttaggtgtataatccatttygagttattttttgtgaaaggtacaagttctgtttctagattcactttttttacatgtagatgttcagttgttccaacaaaatttgttgaaaagactatcctttgttcattgcctttgcgcctttgtccaagttaactatatttgtaagggtctatttctgggttctctattttgtttcattgattcatttgtccattctttcactaataccacactgtcttgatyattgcagcttcatggcaaatcttaagtcaggtagtgtcagctttttgattttgttcttcttgtcagcaagtcttttaacctacctgattcttggcttcttcatctgtaaaatgaggacatctctcttatcaattgtgagaattagagattttatatatttttttatatatataracactatatgtacatagtgtctagaatttacacagtaggtggataatcaatattatctttaccaactttaggtttttgtattctaaaaaaatttaattaaagtagaaatattgaaacatgtaatattattcacaatataatgcccttgtgtcatcttctttaattctgttgctacccttctagttcaaaataactaacgataccatattatttatatattttttcttttgttttctttcctttttttgagactctgtcttggtctgtcaccaggctggagtgcagtggcatgatcttggctcactgcaacctcagcctcccaggttcaagcgattctcatgcctcagtagctgggattataggcctgtaccaccaygtccactgattttcggtattttagtagagacaggatttcgccacgttggccagactggtctcgaactcctgtcctcaagtgatccgctcgccttggcctctcaaagtgctgggattacaggcatgagccaccgcacctggccttatttatatttcttcatattcatgtgattggaagttattttttcagagtaattgttctaagtggataaacataggatgaagcactaggagagctgggttctgatcttggttctgggactttgtagctgagtatgttggttaggattcttttggctataagaaacatcagacacagctaaaagcatctctaacaatatgatatttattctcctacttaacaaggtagggcagcgctagtactggttgattcagagatcagtgcagtcattaaagtccaggtgctttctctttcttcctggcaaggtctctgctacctgcagcgtgctggtgaggcctcctcttatggtggaaagatggctgttgcagctcaaatcattggcacataggcatgacacaactgggaggcattttctccaaatgtcactctcatcagcttttatctgaggaataccttttgccagtagtccctcagcagacttctcccccttcttcaatgtccagatctgggccacatacctgcccttaaactgatctaggcacctcatgtagaccactcatgggctgtggtctgatggaaaattaccacctgatactcaaatcgcatcaggttatgctagcaaggaaaagacagagaatgaatgttgggtaaagcaaccaacattttgccactctgtgtgaccttggccaagccttttaccagatttagcttaattgtctatgaaagaattgctatacattgagtattttgaactatgtgccagggtagatgttacatatgtattattcatttaatcctcacaacaattctttagtacaaattctattgttatccctattttacagatgtaaaaggttaagtaacatgttaacagtcaaaaattcctaaccagtattgctgggaattgtagatctttcagcactaaaattccagaattacgtagattaacataaaatatacaaacacmtaaaattcatataagatatggtaggtcatggaacagtgtgtttaatgatacttaaatctgattgcctccaggaattctacgatgaatggccaatcaagcttggagaagtagagccttataaaggtccaaagacacctgatggcagggtacgtgcaaatgtcttccttgatgccatctgtgcatggtgtcaggtgctaaaattaagaggccacagtgcatagagcactggcctgggaagacctggagtagtagaaacagcactagacaaggagtttgaggttctagtcccagctatgccccaagctagagctgattggcycctgccttaactccttgttgaacctctccgwttccttttctataaagccagggcttggtagaccagtggttctcaactggaagggatgcatcagagccacctgcacaacattttaaagaagtacctgggcccttcttcagatatgtgggattagaatctctaaggaagggttgggttaggtttactttcccccttgactgcaagcttcatgaaggcagaaacccctgtgtccatagcacacaggaaagagaaggggatggattgtgtccaggcctcagattcatcatctgccccwwgaaacagagagaataattctctagtccctttcagctttggcagtgaarcctcctgtttctgaggcacctgttcagataagtcactgatgaaaggagggtacgggtcactatatataatgtaaaactgactacagttaagaaattacatgatttgttctagtgaagttattaatgtcaggtatttctggacaacaaaagggatcacttgaaaataaaaacagactctctgatgatttggtagccaaagatcccccccaccccaaaagctgtttgggggcaattcaactttttaaaaacaaaatttattttagcctgtgcatgtagataaacarccaataatatttctggttttattataagtttgtagtcaggatataagtagtttgataattyatgttataatataatgtggttgggaaataaggttctatttgtaagagttttaaagtacaagttccccaatgaaaaatgatttctttgggaaataacattattcccataatatcctctttctttcttaggaagtcaacttttataaaatcattgattacattttacatggaaaagaagagatcaaagtgattccgtgagtattggcaggaagttgctgccgcagttgccgttgtatttttgyacatattgcatttctctatattgcaatgattttttttcttctcttccccaaggacgcctcctgcagaccactggacactcattagtgggttgccaacatatgttgctgaaaatggatttgtaagttattgaacaaattcaaattttaaataatattgcaagaaactcttattagctaagagatagatacaattgtgaaagcaagaatgcatccaataaaagctagatgggmcgggcgcggtggctcatgcctgtaatcccagcactttgggaggctgaggcgggygaatcatctgaggtcaggagttcgagaccagcctgaccaacatggtgaaaccccgtctctactaaaaatacaaaattagctgggcgtggtggcacatgcctgtaatgccagctacttgggaggctgaggcaaaagaattgcttgaacccaggaggtggagattgcagtgagccaagatcgcgccattgcactccagcctgggcaacaaagtgaaactccayaaaaaaaaaaaaaaaaaaaaaaaagctagatgatcacttcctttggcataggacaaaggagagaagaatcttgacagtcaaatgtaggttaactggagacttctgaactctacacagaaatatttagtcagcatgagaaaggttcctccatccctcaatttcttattctgcagccacacacatttcagatatcctttggaatccaatgactatgatttaatgactgggtttaattctatctcaagtacatcagtcaattttttaaagcataaatatgggggatggggtggggatggtgtgggatgtggaacttttcaatattgagttaaaagcttgggcctctaaggtcttgacccacctgtaaatgttcttataacatttagaacataatgttcttcaaagaaaggactaaaacagataattgctgatgaaaagtttaaaaaagaataggctgctttttgcctcttcaaaaacacagttgaagggtgctcagcccatcaaatgatgtaatttattcaagttagatcatgaaattaatgcatggcatgaaagattccttaaattcttaggctatatatgcttataaaaactttgaaagattctcgcattttctrtgtaagagtactacaaaaatagtagacatggttcattcaattattctcagaaagcacttaccttggggccgagaggcaggcagagtttggtgaggtggggatttaaggagggagcccacttagatcttgttagattgttagttttttaggacttttgtgagcaagttgttaaactgttggcagcttgaaatctcccatggcaagagaattgggaccatggaaattggyaactgatacaagccaaggatttccccaattcccagccaggagagctgatttccccagcacccattctggagctcacagttctagttccatcccatagatttaaacaaatcacttaacctctttaggcttccatttgttcatttttttttttwaagtatgaacttaattgctaagatcccttctggctttaaaatgctatgatagctgggtgtggtggctcacgcctgtaatcgtagcactttgggaggccaaggcaggtggattgcctgaggtcaagagttcgagaccagcctggccaacatggtgaaaccttgtctttactaaaaatacaaaaattagttgggcttggtggtgggtgcctgtaatcccagctacttgggaggctgaggcaggagaattgtttgaacccaggaggtggaggttgcagagagctgagatcgcgccattgcactccagcctgggaaacagarcaaaaactccatctcataaaatataaaaaataaaatcaaataaaatgctatgattttaattatctcttggaaagacatggtcttttattaagatccatttgtgattatgacccaaggtacagaaaacttaaaatgacccaaagttgagtgatttcttgtccttatagatgtgagcaatagtctgtgaattccactaagtaaagtgatatctctcactgaatccttactttggtgtaactaaaaacttatctggctgtttcctcctgcctcttaaccatcatcttctaacccaaatctcactttaggaagaagaagaagaagaaaaaaagcaatcctagctctgctgctcatactggctgtagcagagctagratttctcagctttctcctccccttggcctgagcagcctgttgctttgaatttgaaggggattccctggagtctggsggagtgggaagssgcagagacggtaccacatatcctccagtgatttaattagcagcagggaagccatcttgaatgagttgttagcagctgtggcctagttgaggtccatttgcccgcaagcagtcaagagccgtgtagraaatcctcactcccaatgcgttctttcttattctgctttgtggatcaagagggctccactacacaatatttcagaccatttgtctcctcttgccttccagatctgtaacatgatgaatgcccctgcrgatgaatacttcacatttcaggtaactgcactctgggtcagrcctcacctcttggggctggggtagaggagtggatgctctcrcctctcctccacccccagagtccgcctgatgctcaggtgtggccacaggcacacacgggtccatctcccactcaccctggctgggccagcaagtagcagattcttcagtgaaggaagaaaagaargwtaagacagaaggccagggaggggacctgccactcctccatttgctcacactcctggtcatttacggcagtggtccccaacctttttggcaccagggaccggttttgtggaagacaatttttccacagaatgagggtggggtgggagatggttttgggatgaaacttccacctcagatcatcaggcattagttagattctcataaggacggcacaacccagatctctcacatgcgcagttcacaagagggttcacactcctatgagaatctgatgctgctgatgatctgacaggaggtggagctcagacggtaatgtgagcaatggggagtgactgtaaatacagatgaagtttcacccgagtacccactgctctcctcctgctgtacaacctgctggttcctaacaggccatgggccagtactggtttayagtccagggrttggggacccctgatctaagggctcaacagttcctgrcacagcattcatgctcaataaacgttctctgcatgcatgaatggctggctacstcctacatcctgaatcctgctctcctggtggttttctcagcagcccttccctgcagcttattgcaactgttctcaggaaaatcaacaattctgaytgagtcttcagagcttctcctgctgttagaytcggttgtatccttccttctccactgtgcagagacccactgcctggggaatctgcctccactcaccgccagatgctcccaggaatcagcttctgtatgtgctactctasctgacccacttctccccatcagggcttcctgctggaacctggctgcagacccgagttgatccctccccgccccccgagttcatccagcccaccagaagggccagcctgtcatcttcaccaccccctccccaactgtcaccccccacctgtcatctctgccactcccttctctacctgcccatccctcctcacctgtcatctctgccacccactccccacctgtcacctcctcccaacctgactgttagagataaactggcatttggctccacagcctcttattttctgcctctgggcacttgttattctctgtcctgtatttaaaaaaacatccccttagagccctgatctcagtcacaaatagagactgccctccccggtgggtaccgttggggtctgtttttctgtctctctcacatacagagccccatctctgccttttaggaaaagccagccttccccaggctgcagcgtgcctccttagcggcagaaccacaccacaccttggggaaagctgtacacacttgcttcgttacgtgcatctgcctgctcctccctttgccgattgacatggaaaacatgtaaacaccatatggctgctctagctccttcctccttgcaattgaagcttatttgtgaccatgctgtgcccaggcctgacccctatatttatggcacgtggatgtcagaataggatgcatgtcagcaaaagggcgacaatgatwttctagagtctgaaccttaagcagtcattgtctaaacagggagtgggaatggagctggcccaggagaatgcagsctgctctgaaatgtgaggccctttgctttctctcatgctccactgcagctactgctctgatgtgctctcatggcctgggcagagaggaggcctggggcctcccyggggccttggggagtccccagtgtgggataaacctccaggccacagggatttcccagttctctgggaaacatcattgtggtgcccatgaaaatgtgcttctcagatctccacctgtgggaagtgtagccgtgcaatggctgctggcctgaaayccatggtcacatctgtgctgaggccacacgctccacaggccactcccaattggtaactaagtgtggcagggacagtaaagcaggcctgctcctggaagacagccagataccctgccaggcagcttgggccctaggaatgcctaacagctctgcaaacagtttcagaacagcacggtggtctaaggggctcccctcaaccttscatccttccgtttctcctttgcaaagggtcgggactgcatctctgtctgatgtctctctcagcacccccagcctccctccccgccgctcttcaacggcatcacctgtgcatcattccgcacagcggactaggacgggtgaccgccctccccaaaccaccaccctccttttgtgctccgtcttctgattctgtctctccctgctcaggccccaccctgattcttacgattcctttttgcacctgagaagtttgatagacaagccaatgatataaaaagaactgccatcagagcaaacctgcaaaggcagtggttctcacactatgtttcttgggggcataatggattcatttcctattgctgctgtcacgaattgccactgagtggtttaaaaccacacgaaatgtattatctcacagttctggaggtcagaattccaaaatgagtcttcttgggctaaaatcacggtgctggtgggactcttgctttctggaggctctggggataattcatctccttgccttttccagcttctcagggcctcccgccttccttgcctggtgacccttcccctggcagagccagcagcaccatcactctgaccttgcttttgtcatcatagctccttctcccattctgattctaacctctcttctacttttawggatccttgtaattacattgggtccacctggaacatccaggctaatttccccatcttaaggccagctaattagcaaccatcattctatctgcaascttagttcccctgtgttgtgtaagataacatattcacaggttccagagattaggatataracatctttgggggccattgttctgcctgccatagggttcctcgaagtggactaaggggtcttcctttaacgtcaattaaagtggtcctaattcacaggaggaaaagtgtatagaatttcctcagttttttgtcctactaatttttcttaaaccttgggttccttctgtaacttgtctgtcagtaaggtctaactaatggcaaagcacaagaatatgaactggtagcaaatgaatatttcctgaaacactgagaagcagtcagcaaagcttattttggaagctttaacaaatasrcatgaagttctttcacacgcatgtgatatattctctattactgattttgtccttggttcgtatgatggtgtaagtacataaatatttcttattgttttccaaagatgcaggctttgcaagcactatgcactgcatcttttttctaaagctttgaccatcaggagacggatgttgaggtttggttcctctgcttttcattscatgtataatgactacatagagtagtaacaaattacttagattgagcacttattacatgctcagtctaaatgttaaattgtggttcaggctataagtgcagttggaattccaaaacagaaaagttctttatgagttagaaaaattagaaaggcttcatgggagagccaagacttaacaggggcctgtaaggatgactaagtaagccaagggaagtcttcaagaacaaataatgtggtgtgttgagtgcttgtctatctttgccttagctacatactgtgcaaatgctacatcatggttctcaaacttcagagggcatcagaattacctgggaagcttattgaagwwgcatgcccaggccaggcatagtgactcacgcctgtaatcccagcagtttgggaggctgaggcgggcggatcacttgaggtcaggagttcaagatcagcctggccaacatggtaaaacctcatctttactaaaaatacaaaaattagccaggcttggtggggcatgcttgtaatcccagctactcgtgaggctgaggcaggagaatcacttgaacctgggaggcagaggttgcagtgagccaagattgtgccgttgtactccagcctgggtgacacagtgagaccctgtctcaaaaaaaaaaawaaawaaaaaaaawtaaacaagctaaaacaaatctgttacacatggtccttggaccacactttgagaaacactcctaaacttttgtgcctgcatccctcgactagaccctaagcatcttgagggcaagacctgtgatttattctttgtaccttcagcaactgccccagttcctggcataccacagaggcttgacaaatgtttactcaactcaacacaccacagaatgaaagactatcttcatggatcagtcagaaaaacaaaaaccacactagtattttaacgggagrattttatttaaggaattagctaaacaggtgttagaagatagaaaaagtgtaaagggaacagtgaggtaacatagtggtaagaagcacttcccatcactcrggcttgggaaagaaagggaaaaggttagaattgtcagaaaacagacacttggttctagttcactctattggatgtgctagagtacatataatggctgtatggtcctagccatgttctgacacaaagtaggaattgcacatctaacaccaaaagattactctttcttttttttttttgagatggaatttcactctgctgcccaggctggagtgcagtggcacgatcttggctcactgcagcctctgcctcctgggttcaagcaattctcctgcctcagcctcccaagtagctgggattacaggtgccsaccatcacgcctggctaatttttgtatttttagtagagatggggtttcaccatgttgaccaggctggtctcgagctcctgacctcaggtgatctgcctcccaaagtgctgggattacaggctccagccactgtgcccagcctttttctttaaattaaaaataaactaagtgacaggtggttgggtggtagctagaagggaggagtacaggacagtcttgtagtgatggaatagtgttgtatcttgattctaatggtggttgaaaagctacacaagggataaatttgcataaaactatatgtacacacacacatatatgtgcaaaagtaactgcatacaaatcttggtaaaatccaaatcagctctggatcgtacaatgtctgttttctggtttcgatattgtactatagttacacaagayggtagaaaatgtactgtagttgtctaaccatcattaccattgtgtgaaactgggtgaagggtacctgaaatctctctgtacatttcttttgtaatatcctgtgaatytatgattatttcaaactaaaaaggsaaaaaaataacttgaggtcccttctcgtttgtagaaaggacctgtagacgaaactggttgggtcattaagaatgttttgtccctgcctattgtcaacaagaaagaagatattgtgggagtggctacattttacaacaggaaggatggaaaacctttcgatgagcatgatgaatacattaccgaggcaagtgcaataataagataatggaagtcaatgcaattcacaaaataagagagggcacgtaattatttgttattctggaatgatattttgaagggccattaagacatgagtcacacatagctgtaaccaatatgttgttattttgtcgtttctatttcctgacttctataaactgcaacattttctaccaaagtataaaattttagcttaaccaaaatttgtaataatactcggaaaacaggaaagaggattttcttcttctttctcccactcctccttcctgtyccctctcattcttattcttattcttacgcccagccccctgcctaatttttaggtcctgcttgactatactggtgttggtaacacctctctcttctattcatggtgcatggtacactttaaaaagcaataattcagccagttttattgtctgaagctgattattagtatgtttttcttaaattaaaagaaggaatggggtggttgatgatggaagggagatggatagaaaagcgtgcagattgttgcctccaaaccaatttttctttcactgaagagaattagaatcaccttttatccrtttcagactctcacacaatttcttggatggtctcttttaaatactgacacctacgataagatgaataagctagaaaacagaaaggacattgctcaggaaatgctcatgaaccaaacsaaagccactcctgaagaaattaagtccattttggtaagtgggaaattcagtcctgtggacataagatgttacctaaccacatattctagaagtcatctaattacccaggggtctgacaaatgcaaatggtttactcctgggctgagagagagagacagggaaggaggggttggaagaagacatggatggcccagtgtacagagacccttactggaagtacagctgcttggctggaatagcactttgttcaaaacagccctggggctatgggagctatagcaagaaaaaaatatatatattttaggaagggaaatgtatcagtcagctattgtcatataatgctgcataacaacaaccctaacrcctcagtgtcatgcagtaatgaacctctatctctcactcacatttgtgggttgaccaggctttgattgacagtggctggacttggctccaagctatgaatttggtttgctctatgtgtctctcatccttcttggaccaggagctacctgatagatgtccttctcacaaagatgacagaagtgcaagagwgcaaacctaactgtgcaggcatacttcaggtttttgctcacatcacattcaccaaaatgctcattggccaaagaaagccacatcacgaagaccaaccttatagatgatgggggagcaagtggatatttgctaaccatgttctaatcaccacaaaatgaagggaaaatatcatgtgcccaccatctctatttcttttatttccctggygtgtgtgtgtgtgtgtgtgtgtgtgtgtgtgtgtgtgtgtgtgtgtagttttgctggagtgggttggttttggtgagcatgttggtttttggttttgccgagtggtttgagtgtaattcagtttgatagtttgagatgttaaagatgagaagatctgggggtaataaaagsaactgtgataagctaatacaaaaataaatgtaagccactcattttttctttcctacatgcaaacaacccacacctctttaaaaaaaccagctactgtaatcattttgggggaattttaaaaatcaaatatattagattatttcttgaaaaaagtcttcataatcaggtgctataggtctttgtatccatgacaaagaatgcgtctttgccatggaactcattgtagtatattttatttatttacttatttttagagatggggtctcactctctcacctaggctggattacagtggtgccatcatagctcactgcatcttccaactcctgggctccagggatcttcccgcctcttcctcccacatattttaaatatatcttaactaagattgtaatagtagaggaatcagatggaaatcttctcctttaggaatttcacacctcaattgcttttacattttagaaatttcaagagaagttaaatgttgatgtaattgacgactgtgaagaaaaacaacttgttgcaattttggtaagtgttttctttctaaccttaatgcctgttaaatagaggcattataaatcaataatatattaggacatgctttcttgtttttcaagtaaatgttgagttttctctttcctgatatttctcaaggctaaaaagaaagaattcttctaaagattgatcttttgattccctgcttttcttcatctttgtcgcctctggtccaattcatacagataatttacaattgtaggtagcctagactactgcttaggggacttcaggcacagaatctagggatatcaaggcacagtttattttaatagctttggatgacaccatggccaccacagagaacatgacagagttagcgtggagcatggatctttctaggcactggcaccgcctgccatttctagcttctcttctggagtctgaaggctccattctttcstgttgttgccagtaggccatccctattatttttctttgaaattaactttcccacttcactaattctgtcttttgttgtgcccgatcaactgttaaactcgctcaataagttcgtaatttcagagatttttttcagttctagaaggtacatttaattcttttgttaagattctaactctgtgttaaaacttttcatcatttgatctattttgactattttcccctgtattttcataaatgtattgatgtgtattattttaaggtacccatcttaataccagaatcacctgtagatctgattctactgtttatttttacacctgggttctagtcatttgatcctgttttaaagcatgccttatgcttttaaaataaaaaatcagatattgtagataaaaacgtgtaggggctctgagtgatattatccttctgcaaagagcattagagtttcttctggcaggtgagagaattgttttagatttcatttggaatgatcttttttggytttattcctactattagggtggagcccttgtttctagaaagtggctcctctggaatccatgaaatcctgggatatttacgaagaccccaagaccttgaatttcagaggattgaattccttctgattgaaatggaaatatcacacttaatttccttactaactgctataacctgttttccaccatctctttccgatctgtgatgtgagcattctttctaaactaagacacatcgactatctcaccttctccctttccatcttttgtgggctctgtcctcccacccagggcctttgctctgctaccataagactgttggtctttgacccttttttggggcttacttcccacccccgtgttttcatgtcatctgaggttcccttttctcccattttgcttggctccacctttggcaccatcctctcagcctggcccagaagaccaccctttcttctccccacctgccctcaacaataggcatcttcttggaaaacaaaacttttattgacatccgtgtcaccagaaattctctaatttcttatttaaaggaagaaggatcttatgttgtagaagcaataaagtggacaaagaaccagtagacttcctaaaaaaccagcctattttgaatgtaaaatctactcagggcaaatcccaaatcattgttgcataaaattgaggaacgtaacaaatatttcagaggagttctccaaaattatcctggcatcatttcccagctacgtaattatttgtccatcttcacgtacctgagtctctctccaggcctgcactttcatgttacctccagggaaggctcagctgattttctgggtgtagcaacagttctgtgcaagagtgtgaggggycagcccaggctcaggggctgggggaaccagaaaccgtaattttgttttaaatagctatataccattcggtgttgaaatctgtgtaaatagagcatggctgtcccctgaaaaacattaaacttactaaggggagtgacctccctttccctatgtttgtgtcctcctcagtgcactagtaaggacatactacacattcaaataaatacccattgaactgaatctctcctgcagatctgtctggtaggcccacatagttgttgctcatttctgyctcttagcactttctcacccacatggaatcgtctctccgcttccttctgccagctcagctgcatgcatgtccctccagcatctctcctcctttaatttccccacctgtccaaggacattcagtttctccctcggcatggagcacyggccatactctctgattattctaagtgcttacttttcactcgtatatattttatagccactttaataagttaagttccttaagggcaagatacatatttttatttctcaagtcgcaccaatgccatgtgtctacttggctattttttcacataatccgaaatcctaaccagatgtgagttaaatgaaatgtctgcaagtatacctatgtactgcagggcaatcattggtttatccatccactcattcattcaacaggcatttcctgagcaccttcatgggacaggacctgcagatttgggatatggcagcaaataagcagatgatccccaccctcggggagctcacattctagtgggaaactgtcactgagcacataaagaaaattcaagagaattgaattaagcagtcgtttactgtttactgaatatttcttgaacagaaaaaaagttgagtatcaaaaatgagtaaggcttttgtaactaaacattttattttgcatcatwgaaagaaaagagctactggagttggatttagaatggtaacccatcacttagaaagtctttaatatggccaagtctcagtttcatcacctgtaaaatggagataatcgtgtaggcctgccgttagcataatctgtgcaaactgcatcatccagtgcctggcacatggtggttcagtgaatcacacattgtgttcttttattgtaattttggtttacacccaatgttggctatgggagtggaaagggaaaacagatgaatgtaatctgaaacaacccatccttatttcaacagaaagaggacttgccagacccacgctcagcagaactgtacgaattccgcttcagtgacttcccccttacagagcacggattgattaaatgtggaatacgactgttttttgaaataaatgtggtggagaaattcaaagtacctgtagaggtcagagggtatttaatttaaaatactgtgtgattctgtggctctgcttcactgatgttttctgtggttcaaaagatggastcagtttgaattttaaattattattaactttctaaatacatcagcttaacccctatctacaagaccaacacatctttttagataagattgccacagaccttctaacctttagaattctattccaaagtctgaatggtgtcatcttcttttaggttcttaccagatggatgtacactgtgaggaaagggtaccgagctgtcacttaccacaattggcrgcatgggttcaacgtggggcagaccatgtttactttgctgatggtaggtacagagggctgtaaatccttgtaaacctgcagatttcccatttgagcatgatgagaaataggtatggtccatcattttagatcagtaatttaaaaattcagggcacaaacccctctccgctgcagatgagtcccagtatccttgagcaccggtgggatgatcattcagacattcacacacttaccttctyaaaggaaggttcagtcttcacccacagtactacaatactcacaacaaataaagtgaacttgctccagaaacctagtgggcctattctctattgcaggctgcacttggtatagaggtatattaattcaaataaattatagatatgcatatatatgttatttttttagacaggaagattaaagaagtactacacagatctcgaagcctttgccatgcttgctgctgctttctgccatgatattgaccacagaggcaccaataatttgtaccagatgaagtaagtgaacacatgtccaatgttsacacgtattggtggacattggaaagtacttagggtgagaaaaacgcttctccctattccttggcccagtcaatgcctctttgccatgttggaaattccagggctggattctattccctcccaagcttccgccttcrcgataacgttgctctttctccctaggttcttgcgtccccctttcctttctgttttcatttccagatgtgcctctgccttcttcctataggccttcaggctttcttctctcaactttgtttaatcagagtattgaattcctatattaaagtgcawgaatctggctgggcacagtggctcgcacctgaaatcccagcactttgggagagtgaggcgggcggatcaagtgaggtcagttcaagaccaacctggccaacatggtgaaaccctgtctctactaaaagtacaaaaattastcggatgtggcacacctgggattataggcacatgtctataggaggtagacrtgtgcctctgaggtaggagaaacacttgaacccaggaggcagaggttgtagtgagccaagattgcactactgcactccagctggagcgacaaagagagactctgtctcgaaaaaaattaaaaataaaaaacaagtacataaggtacatgaatgttaggcttacacttgtacactcctatggagcactccccagctcaggctagagaatactacccctgggctcactacccttcacctccctggtctttttgcttctgccaaactctccttcagctggtcttccatcttaacatcgatgccatctttctctcttgccccaagaaaggaagtacaataagaagggtgcaagctctgggctcaggcagatttggattcactgggtcacaaattatttaaactttctaagcctcaatttcctcatctgggaagtaagaattatagtaatggtacccagcacataaggttgttgtaaagattaaatatgatcatgcatataaagccctcaactcatggtaggatcttggcagttaataaatattaggtatgattgctgggtgcggtggctcacgcctataatcccagcactttgggaggctgaggagggcagatcacgaggtcaggagttggacaccagccttgccaacatggtgaaaccccatctttactagaaatacaaaaattagccggacattgtggcgtgcacctgcagtctcagctacttgagagggtgaggcaggataattgtttgaacccaggaggcagaggttgaagtgagctgaggtcacgccactgcactccagcctgggtgacagagcaagactcagtctcggaaaataaataaataaataaacttcaggtattattatggttactattattgttgtgatgtcattggactattcattcaccagtattgctcatggccagcccagttccttgataatgggttttaagatggtctatctgccttagccacacttcattctcatttctgacacattgaactacccctctccagaagtagtgaagtgttgtagacagactgaatgggctttggagtcttgggtttgtggggaccaactacttcttggttgggggatcttggacaagtcatttaatctatttgagattcagtttcttagccatgagatgtataaagtgttgacctctcaaagattgttgtgagaatccagtgaaattacatatgtgaaacctacttgagaaagtgcctgctaggcaggtttcacatatataatttcattgagcgaaaagcactttgtaagcagtgactcctcatcttcagcaattctacctattattaggctttgtcttgaaaagatgatctccatccagacttgaggcaagagacatcttcatctcaaaggttccagcctacactggccgctcgctcctccagaatgcaagtcccctgacagtcactgaagtcctcgtcctccttcttgatcagtagtatactagccaattcagttccagagaaacaaattgagcatctattgtgtgctagtaaggacttgatacctactgcctcatttaaccttcacagcacagtgaagggaggtgccatataggaggtactagtatcccccactttaactgatgagctcaaaagatgaagtyaaaccttccctaggttataggaagtagcaggattgaagttgccrtcttgcctccaggtttgcaggaaagatgcatgcagccacaccctgccctctgcattggcctggttttctttcatcattcctcctctgtaaactcaactgtatgggcatgtggtgatggaagggcttcctgactgcagactgtcagtgtgtgtgaatgtctgtgtgtgtatataaataatatatatattttttggagacagggtcttaccctgtcacccagggactgcagtggcatgatcacrgctcaytgcagccttgacctctggggcccaagcaatcctctcacctcagcctcccaagtagctgggactacaggtgtatgctaccatgcctggctaacttttaaattgtttttgtagagacagggcctccctatgttgcccaggctggtgttgaactcctgggctcaagcaatcctcctgcctcagcctcccaaggtgctgggattacaggcctgagctactgtatgtggccaactaattctttttttttttttcactaaatcatttgtgagtcagctgcaatactagatttcattcctaaatattgcagcatatatttattaagaattaggaggacattcacctacataaacacaatacaatgatcaccctcagtattggtacaataatattacctaatataaagtgttttttaaaaattttccaattaccacaataatgtcctttatagctattttttccttctaattcaagatctaatcaaggagcacactttgcatttagttgtcaaatatctttaatctcctttaatctggagtagttgctcaacctttttgtgtgtttcaggatgttgatgtttttgaagagtctaggccaactattttgcagaatatctttcaatttggatttaaccacttgtttcctgattaataaattcagactaaacatttttttggcaggaatactacatagatgatgctgtgtccttctcaatgcattgtgtcaagaagcccatgatatcaattttatttatggrcgatgtccagaagatctctttatgtaaaggaacattttctcctttgcaattaataagtaatacgtgaaacgttagtttgagatcagattaatatctagcttcccaataacattttttaactaatgtttttaaacctaaaggaattaaagataccactcctttctgactagaattgagctttttcatttttaaaaatatacattttaaattgctacataatagatatacatacttttggggtacatgatattttgatacattcatatgatgtgcaatagtcaaatcaggataattgagatatccatcaccttgaacatttatgatttctttatgctgggaatattcaaattattctttactagctattttgaaataacaatggattgttgtttgctatagttactctgttaatttattgaacagtagrtcttatttcttctacctacctgtatatttgtacccattaatcaacctgtcttcatccttcccacctccctacccttcctggcctctgataaccaccaaactactctctatcttcaaataaagaaaatgtggtgcgtgkatatatatatatatwgtatatatatagtatgtatatagtactatatatatactatatatagtacatatatatagtgtatatayatagtacatatayagtatatykatatagtatatatagtatatatatwcactatatcgatatagtatatatatamhggaataytattcagccaccaaaataatgaaatcttgtcatttgcagcaatatggatggaactggagattattttgttaagtgaaataagccaggcacagagagtcaaatatcacatgttctcactcatatatggaggcttcaaaagtggatctcagaagatagaaagcagtttggtggttatagaaactgggatttactcatttttttaaaaatctctaatgccaacacagagtagttgtttaaatatgtgttaaaattatgatcgattgtartattgatcagatatggcctaattattccccaactaaagtatttgctttccctgacctgccagtaacctggcaatgacctctcccagcctaaagttttgttctccatgaaataaataaagcttctctactaaggctaccagccatgttttttatttcttctttctttaaaattatttattctatattttcatgagagtcttcacataatctctagacctttgacatcagcctcttttaccctgaaggcattgaagaaaaacagggtacaaaagactggggcccctacttayataaagctgtgatctaattgttaataaatgggaaggaacagggagatacatttatctcactgtcttgggggaggagagaaatgttaccttatagtgcttttcatcttggttctatgcagataacctatgggcctccacatgtttgctataygttttataagtcatartccaccgccataagccccagggaacttaaagaatttagatacaaggagctgaactccttagtttaaacaattaaatcatttatgcattcaacaaattaaggttttttttttccaaaagagcatattctcatcttctaaatctagaaaatcttttccaatatgttatttttgaccacttcacagataattgagtgaggagggagaagagagacattaagaaaaatcctgaattgtatgaaccwgtgtaatttttaaacagctagaatcatggcatgttgttttccttctagatccacgtctccattagcaagacttcatggttcttctattttggagaggcaccacctggagtacagtaagactctgttgcaggatgaggtacgtaaanctctctttaggacagctaaacacaaattctggatcaaagcactaacccacagaaaatgcttggaaaaagggtggccttgagttacagcagttgatagtgtatacccttgttgaagtcaattgatagaaattgctatattgaactagtttttgaacagccaagttggaagtagctgagacaggtgaagagagccatggaaagtcacagaatctctgtgggtctgtagggaaagaagaaaaagcttatggtggatgcaaaagggctccrtgcaccccaagcatatgtaaatgtaaagaggaaaggaggctacatggtcactgatttgcttattcattcatggggcatatgctttagagcatggtctatgcctttaagaaagtcaagctttcatagtggagtgtattcacacattcttgcattgctataaagaaatacctgagactgggtaattataaagaaaakaggtttaattcactcccggttctgcaggctgtacaggaagcacggcagcatcaacctctgggcaggcctcaaggagcctacaatcatggtggaagctgaagggggagcgagcacttcatatggccagagcagaaggaagagagatgcgggggaggtaccacacacttttaaataaccagatctcatgagaattcactcagtatcatgaccaaggaggatggggctaaaccattcataagaaacactgctcgcaaaatccaatcacctcccaccaggacccacttccaacattggggattacaactgaacatggggtttgggtggagacacagatccaaactatatcatggaggtaggcatgacgtagccaccatcagagaggcactgagccatgctctgagagttccaaagggagaaaccacatttgtgtgaagacagtggcagcggaaaggggcaaagagggtgggatcagagatggctttctgcaggagcggctcagccccttgaattcattgtgaattgcacatattacgtactactaatcttccagagagggtagtcattcttcttcccttgatcaattttattgaagggatatatgggcctgtggaaagttgtggatgttgtctaattatactttcttaagaacgttccaaacmaaaaatgattaaggtgagtcattagattgaggggagcactgttttgtcrmaggcagtgaacttgttcagaatcacatgcttcattaggatacatgagccctctggagagtgggcttttctcactttcaataataatcttttattaaaagctcagggagaatatacagaaagatatccaagtttagagagaatactaaattcttctaggtaatgaaaatccaagatggtcctcataagccaagcaggaaaatctcataaggcagagcaactgggcagaaaaatggaaaaagaagaaaactgcttgcgttgttttaacagtctgtgattgacacagcacccaacaccattgccatcccagacctgctgtggcatttctaattccgctatgctcttggcaaagcactaacctcatataagtccagatggtggttctcagacatgggtacctggaccaactctttcagactcattaatttaacagggcgggggcagacaggctgttaaggcacagatcctgggccccattctccacttactgaccagactctctggagtttgggcctgggaatctgtattttgaaccagaacccttttaattctgatatgcagacagaatctctccctgcagcagaattcacagcataggtaacacctgttctatgagaattaaaagaaggagcggaactgaaaataactcaggaatgtaagagtaaattgttattacctaatttgttataagtctttattttgctggttgagacaatctttggtttctgagtaagaattttctgtaaatcccactgtttatatgataccacagtgaggtagcatcaaatgtcatgtatcgcataatcatacagtcacctactaaaacaaaatactgttttaaaacagctgccaaatatctacatgcttaacactggaaggctcctagtttcttaaatgtttttccttctgggatttggcagtttagagttacagttttccatctgaattttttttaatgttatttactttgcagtctgaactggctttgatggctatataaagacttattattctttctaaaaaggaatattgcatctcagtaatctataccatcttttcaaggacctctctgtaataccattcaacctgctaattgcagacttttaaagccttgtcaatagagtcgctaggcaatgcagtcacacagagcctgtttatgagcagtcaaattggacacacacacaaaaagattgttacctatcagatattctttttacattttggggagacaatgtagttcttgtatttttttcattctctaaagaaaatacacacattaaaaattttaatttttttaaataagggaaatccttgggatttatccagtaatttcagcatctgtgggcattactcagacattttgttttgcatattataaggctttgaacggcaatgtccttctatcctagcagagatggattcactgctttgaggaatagaactgcctgtactctaaaccagacagaaatcaatgctttaacccaaatgaatgagtggaaamcttgttagccaaatttgcacaagtataaattttaatactagaatatactgtagaaatgacaaaacatattgctcagcataaataacaaaatcttgttattattcagaacatctctttccaaagcgtatgataattttatttatgctttttcatatcaaccgcatcagcctgccccattttacrcatagaaatgtgaaggagaaatcaaataccttgtgtactggcactagcaaggcaagaacatgttggcaatattctcttgcgggcgtcataggcaccatgctgaagactagaacggcctgtactttccctggcctcagctagctcgagagccacgatctgaatgaattaaagccatttctacctgtttggggtgtgctwtgcagaattcatagttctatcgccattttaatagtcagggaaaataaaaaagattctttccgtgagcaaatgaaagcagctgagcaagtcagggcccgtggccagrggctgggaagtaggtctcctttcttgtctagtgcacctgtctccacawaatgtcttcaacacaatgctcgaaaacaaatggaatattacatatttatacatgtattcaatgttcattaatagttgcaaaagttacrtaagcccactataaaaattcaaacgataggaaaacatcaaagacaaatatttcttaaattgcttcaaatcctaccatccagaaacygatatttcattaacgtctaatgaacctcattgcagtcaccctgtggatatacacaggaagcatggagagaaaggactccatgtgttcccactacccaagctatttttttaagccagagttggtttttaatcaacttcattgaagtatatrtacaataaactgcatctcttattttattttatttttgagacggagtctcatcttgttgcccaggctggagtacagtggcgtgatctcaactcactgcaacctccgcctcctgggttcaagagattctcacacctcagcctcccaagtagctaggattacaggcatgcaccaccactcccggttaatttttgtatttttagtagaggcagggtttcaccatgttggccaggctggtctcgaacccccaacctcaggtgatccacccaccttggcctcccaaagtgctgggattacaggtgtgagccaccatgcctagcctaaactacatctctagagtgcccaattccatgagttttgactattttatatacctgggaaaccagcaccacaatcaagatgcagaacacttctatcatccragtaattgytcatatcatgacccttcacagcacatcccactgtccactcccagccctaggcggcaacctttgaaatgttttcagttgctatggattagtttacattttctagattttatataagtgcaatcacacaattagcacaataatagaataatcatgcaatcaatcacactcttttgcattggtttctttcacgcaaaataataatttttagattactcatgttgtgtatrtccatgattcattcctttttttagagatggggtcttgctctgttgccaagactggagtgctgtggcactgttatagctgtctgcagcctcaacctcctgggctcaagcaaacctcctacctctgcctcccaagtagctgggactacaggcatgagtctctatacctggctaatgttttgtattttttgtagaaatgcattcttgctgtgttgcttaggctggtcttgaactcctgagctgaagcaatcctctctccttggccttccaaagcactgggattacaggtgtgagtcactgtgcccagtcaattcattttttttcattgctaagtagaatccctttatcttaaataaaaggtattgcatttgactttatttgaatttaacagaagaaatgtttttgaaatggaaagaattgcagaacttcacatgatrgtgtccttatcacaagaaatgttagctcttaaagagccctctaaaatgaataacaaatgactatgaaaaattatgaaaagttgtagctgagcatttagatgtttgacatttttaagctatatgtgttaactttacagtatctactaactcccttctatgaaatatgaaggaattggtatactttttcccgcatgtctgttttatatgatatatttttttaccattatcaatatttataaaattacattttgctctgtaatttccactattgtttattttaattcaacttttaattgagtccagtacttattgactctacattttcatataaattttataattgatttgtcaatttacaaacacacatacacaaacttgttggtattttggttggaattccactcgctctatggattattttatgttcttgtggtcattatatgcataggttttgcacttgttcccctctgaaaattactcatccctgagtggagccaactatctgcctagtaccgtggaagaagggcaggaatgagctggggaaatcctcagcttccaatttgttgwctcaaacattctctcaccaattctaaggagcacacctgtattagtctgttttcacactgctgtaaagctactacctgagactgggtaattataaagaaaagaggtttaattgactcacagttctgcactgctggggaggcctcaggaaacttacaatcatggctgaaggagaaggggaagcaaggcatgtcttacatggtggcaggcaagagtgtgtgagaaagagtgaggaagtggcacacttaaaaccatcaactcttgtgagaactccctcactatcatgagaacagcgtgggagaactgcccccatgattgaatcacctccttccaggttcctcccycaacacctggggattacaattcgagatgagatttgggtggggacacagagccatatcaacacctctttgattttgttttccggaagttggtaaagctcacactgagcaaagcccatgaagctccaggccttctatttgggatctggccattgctgtctgccttccctccttcacttcttgttacctatgacaatgtctttggtctaggagattgaatatcagaagtcaatacaaatgtacatcagcataacttctccatcaactcctcttttgctgttgttttgtgttgtcaaagtaggtcttgaaaggaattccttgcttctcctgtgcgctgggcacatcttgagacctcttgcyctaattaaagaatcactgagtctgtgtttacttactaaacaaacaaaaaacccaacttgtgtgcaagtgtgtgtgtgcatgtgtgtgtgtgtgtgtctgtgtgtgtgtatgtcccactttgttccaaagaggatttgatggagcttcgaagaatacatacaacactaaagaaaaagaaaatgaggactaatggaaaaataagaaaaacgaggtgagcatagtaaaggccatacatacccaaaatgtatatcagagatgggccacaaatttggccaaaacgtttatcagacacaggccacaaatttggccaagtgctttctagcaactaatacaaaaactggaatgggatcttttatatgaatctatatccacaacttaataagtcaattagaagctcttctttcaagaacctcaggtgtgaaagggagaacagagaaaatctaaaagaatgtagaattaagaaagagtttttcaattaggaggcttgtacatgtttttagataaaaatgaaaatgagygagaagaaaaaggtatgaatgaaatgcagatatgtagtgctatatgcaaaagaagcagtactgaaatggtgactataaaccctttttcttcattatatcaatttttaaaaatccagtattgactcattttgaaaagtaagatagtttttgataatctatcaactttaatacagttgttttattattttggattggaaaaaggtataagagtaaacagtatttgtcacatatgtttctatatatttctttatatatagcgttttctttcacgtctattaaatagcaacaagtgtccaggtttacattaagcaatatgcactaaaacaattggtgcataataaatttgatgtatttgatttgttgtagattatatactctgcacaatctgacacttggtagagacgaggaagtctctgtcccaaggaattatttctctgaattcagcagtctgatttgcttctttaaatgacttaatgtgctataaatattaacttgtctaaaagtttaaggcattttcacacattcctcccctccccctgctttttttcctagtatagcaatcaaggttggcttcaaatattattaatttgccaagtatgtatctgagtcacataataaacatcactttgggaacatagcaatgttcatcagtgaacaaataaaggcagtgattccctgatgtcagtatgccactggatcaccccaagtccaaaaggaaggccaccattgttccaaaatcaggggcaggttaagtgggatcaaaatgactccacttacttttcccctccctggtaatccagaccaggttgaaaataacctgtatccagatttgattcagagattctggactgatatgtacaatagacttctgtgaaatgtcccaagtaagaaattgattcggggtccaggcacggtggctcatgcctgtaatcccagcactttgggaggccgagatgggcggatcccttgaggtcaggagtttgagactagcctggctaacatggtgaaaacccatctctactaaaaaatacaaaaattagctgggcatggtggtgggtgcctgtaatcccagctatttgggaggctgaggcaggagaatcgcttgaacccaggaggcagaggctgaagtgagctgagattgtgccactgcactccagcctgggcaacagagtgagactccatctcaaaaaaaaacaaaaacaaaaacaaaaacaaaaacaaaaaaaaacattgattttgatccagataatctctcttttgtttttgtaatttagactggtcaacacccattgcttcattctagctattttaaaagtttaactatagttgctatgatgaactcattatgttgacaaaacaaatcacaattttcccttctattacttatatatgctttgtaaaacaccacttttcttgtcctagaaaatgttataaaaagatgacttaagggaagatttatataaggcatagtgtagtgtctaaaacttgagttcttgtccaattattgctttctaatatttcaatcttctgaaatgactgagccatatttggtcttaggtttgcaattctatttctaccaggagctagcctcataactttacgtaataataataatgatacaacaataaattttaacagcgatttacagttttaaaatgcattcacagttgtcatttcatttgattcagcattccacagatattaattgagcatagactaagtgctaggcagttaggcagggcagctgttattatgcccatatgagaaaacaaatacagatgttaagtgaagtctctaggattataccactgccaaagtggggaagccaggaaatgaacctgggttccctcttgagaggtaatgtagtgtggtgcagagattaggagcacagactctggaaccatgctgcactggcttagacaccagttctgccacattctagctgtttaacctcgggcaagttacttcacctctctgtgctggggtctgttgtgaagagattaagaatattcacaaagcacttagagcctggtaggtagtaagaactaagtaagtgtttactgttattatttggtgttcaggacagtattgtttttggcattatgctacttctctctttatatagtttgatagactatctcctctttctttccagtggagtttttctgtattttgtaactgtcaaattcatttggcaaaatcactatctatctgtcatttggcctgtatgactaaaatggtctatttggaataactgggctttaagaaaccacccccagcttatatactcattttctttctttctttctttctttctttctttctttctttctttctttctttctttctttctttcttttttttttttttgaaacagggtctctctctgtcacccaagctggagtgcaatggcacagtctcagttcactgcaacctccagtccccagcgttaagcaatcctaccaccttggcctcctgagtaggtgggaccccaggcacataccaccacacccagctatttttgtatttccatatttttagtagagacaggagtctcaccatgttgcccaggctggtcttgaactcctgagctcaagccatctacccacctccgcctcccaaagtgctacaagcatgagccaccatgctcggcctatattctcattttctagaatgctaagaaatgaagctgatccttatgtgaagagatgtagtgagaaactctttgaagaaaggtctagttaagtcttggtaaaatagaattgcatgaaaacattttcaggataatgtggaaggatttcattattttttcctacatatacacgaatatgagtgtaatttgcaatttctgaaagaccagtggtttctatgatcactctaaaattacctggtagataaagtaacatgtctgacagttggacttctcccagaaattctttattaaagcttctcaattaatacaagcacatttttaatctattgttatttattttaatggtcctagaagaaaacatttatttactccaaaaagttaaacactgattacatgaatattggctaacagtatctatttttatagtttaaattaaattatcttacttaaagtatagtagaggggtttgcttagtccatgagataaaaactaaaagcaagccaaaaaaaaaaaaaaaaaaggaaggaaaacaaaaaaaaaacaaacaaaaaagtgttgaaagacttttagattttcttcttgttaagcatagtttcatttgttcagaggcaaattattgatagcattttattgtgaattttcrtcttacagagtttaaacatcttccagaacctaaataagcggcagtttgaaacagttattcatttgttcgaggtcgcaataatagcaactgacctggctttatatttcaagtaagtacataactctgcacagtggaatgccctatactctgtgtggttttaccttccataaattrtctgttgcattaatgttaaaaggcatttattcacacacatacacacacacagacacacacacacacatacacacaaaatttgctctccttttggattaccaagtagagtatcttcaagacagatgcctgccagtaaatttactagacctctgggaacatattttaaaaacataagctcctaatattaagtaggttgctctccgaacaggtttgaattgcagaatgtgcagccaagtttgtgccttgtcaaaagagtgaagccaagagacctctcaaggtggctttttgtccaggtgaattctctatggtccagaatctggcattttaatgtttcagcctcagaaatttaattctgtcaaagtctgggagctgaacaattttgatggcattgacacacattaaccaaacttacaaaactgagtcatacgtaacagagagccagcctatttacaacagtaatattgccaaggagaccagatactcccagtatctccacattttctcataagtgaactataaagttgcttgatgaaaatgggttagaacaagatgaactagttataggatggaaatattcagtggcttgggcattgtcaaattatgcctttctgatccttcactaaatatttatttattatttattattattattatatgtattattatacaggtctcactctgtcacctgggctggagtgcagtggcacaacctcgggtcactgcaatctcggcctccaaggttcaagcgattctcctgcctcagcctcctgagtagctgggacttcagtctcccaccaccacatctggctaatttttatatttttagtagagatgggtttcaccatgttggccaggctggtcttgaactcccgacctcaactgatctgcccacctggccctcccaaagtgctgggattacaggtgtgagccgttgcactgggcctgaatatttaattattaaatagttcaatgtgaagacaaatactaagaataataaaatggatatccaaatatctatagcctaaatttaacaaatgcgaaattttgccatatttgcctcagattttgctttataaggagaaaaaaactagtgatgcaattgaggtattccacccctactccactatgaaaaatcccttcccttcttccacaaagatatcaccgtctgacgttgatgtgtattcataatttccatccatgtttttatatggtattgttgtgtgttgttttttttgtttggtttcttgktttttttgcgacggagtctcactctgtcaccaggctggagtgcagtggcgcaatctcggctcactgtaatctctgcctcctgggttcaagtgattcttctgcctcagcctccagagtagctaggactacaggcacacgtcaccacgcctggctaatttttttttttttttttttttttttgtattttagtagagatggggtttcaccatgttggccaggatggtctctctatctcctgacctcgtgatccacccaccttggcctcccaaaatgctgggattagaggcgtgagccacctcgcccaacctgttgtgtgttttcaaattgtccataggtggtatcatactgtctgtacatacctttctgcaacttgctttattcatgcaacattgtgtttcaaagatttatcattgataataaatggagctccaatgcatccattttaactgaatagagtattcaactgttgaatattcataattaatttacccagtcttctattcatagacatttcaattgtttctaatttttcatcattgcctacaatgctaccttgtatgtccctgtatatatatgagagtttctctaagaaatgtaaaagtgacaatgctgtaggatttgcatgtcttcaatttcatgctacattacaaaactgcactcctgagaagttgtgccagttagcactcccacacacagtgtrcaagagttccagctgagtgaggtggctcatgcctgtaatctcagcactttgggaggccaaggcaggaggatcacttgaggccaggaatttgagaccagcctgggcaacatagcaagactgtctctacaaaaaaattaaaaaattagccaggcatgctggagcatgcctgtagtcccacctactcggtaggctgaagtgggaggatcccttaagcctaggagttcaaggttccagtgagctaggatcaagctatttcactccagcctgagtggtagagcaagattctgtctcaaaaaaaaaaaaaaaaaaaaaaaagaaaaagaaaaagaaaagaaagaaagaaagaaagaaaaagaaaaataccacatctgaagtactcttgaactcagcaaattgaaattttattttgctaatataatgagtgtgagataatatcttattgttcaaatttgtagtttcttgattagyagtgagaccagctggacatccgtgtgttttgggttccaactttttgttggctatatgtgttgtgatatcttatcatagtttggggcctttatttttaggttatggtctcttttctcatatgtaattttgtatttactttcatttttaaagagacagggtcttgctttgttgcccaggctggtttaaaactcccggcttcaagcaatcctcccaccttagtctcccaaagtgctgggattatagatgtgagccactgcacccggccttatatgtaactttttcgttgtaatgtattccaagttacctgttttgttttgtttttccctctctctctctctctctctgtatggtttgtgctttttctgccttaaaccctttctgagccaaagttataccaccattctctgctctcgtattttctggccctgtagactttgctatgtggacatcacaatgcaaagtgggaacgtgaaatctgaaaagcatgtatttaagatattttttctctcttttcataagctaaaattgttgctcacagctgtatcttttctaggaagaggaccatgtttcaaaaaattgttgatgcctgtgaacaaatgcaaacggaagaagaagccatcaaatatgtaactgttgatccaaccaagaaagagattatcatgtaggtagttgaaattgtatttctctcttgttttttgtaaaaataacttattttgtacttatttctattttaaaattttttgttttcttcctaagggcaatgatgatgacggcatgtgacttgtctgctattaccaagccctgggaggtgcaaagtcaggtgagtccagttaagttttcttttctgtcacactgtcaggtactgcctaggtcccatgtaaatgtccacctaaagatctcaggcaacctcagaattctgaaaaattamaaatattagtgagacagtaggcaatttgattaggccctagaataaagcaaatagaaggaactttggaaggagaattctttcttgaaagaattctttaacattgaaacactgtaaataatttatataaaattatccaagaaatgtctgagtttttaaatagaggagtgtattagcctgttctcatgctgctgctaataaagacatacccgagactgggtaatttataaaggaaagaggtttaatgaactcacagttccacatggctggggaggcctcrcaatcatggtggaagatgaaggaagagcaaagggatgtcttatgtggtggcaggcaagagagagcgtgtgcaggggaactcccctttataaaaccatcagatcttgtgagacttacttaatatyactagaacagcacgggaaagatttgtccccatgatccaattacctcccactgggtcactcccatgaattgggaattatgggaactacaattcaagatgagatttgtgtggggacatagccaaactatatcaatgaggtaagtcagaacaagatcaggatgcatcgttagtgttttcctctatcaagggtgtttttgctcctatagtctcttcttcaatgtgctgtgaattataagaaggcactgactgtgagatgatgtctaaggttgccttccactgaagttcttcccccaccttggggaggcactagtctaccacttgctttcttactaattggatgaaaaaaccttcctttttcctccaataatttctagggaaacccctaagcagaagagagcccagaattaaatgggtttaactataaaagtgggttgtatctttttaaaaagatagaataattagaactcagtgtaggggagaaaaaatatctatttctcacccatcctagcttcatgactgaggcccctataacaaaagacagattaacaagagaaaagcgtacacgtttatttgttttacatgtaatacaggagccttcgtgaggaaacaaagaccctaagaaacagttaaacttgtatgttttatgctaggttggatgaattagatagtcatggagaaatagaattcaacaaagagggtatgatctaatcgtgaggcagcttagcaaggccgatttgttcagattcttcttggcatctttgtgtctctggctcctttcctccaggaatagggagggcacctcttgaatgaaggtcttatgatctgcttcaggggaaggtcagaaaatccttacctggttttatgacctacttcaggggagaaggtcgggggaaggtgagactgatcttcctgctgctttagtttcctcaaattccgtcaccttaaaatattttggggcagggtgtcctgaactccgtcaccatcaagtccaaaaccaaatgcttcctctccttccacctcgacatgcctgctcttcttcctctgttctttatcgatgaggtcacccaagctagaaacctggggtcctgcttgagcttatctccctcatttcaaaatcatttatatcagcctcgctagtacctcagttctgacttttatcagaactatggtagcagcctcctaatagatgctcacatcaactccacaagtcatcctctgacttgctgccaggatgtctctacacagagctcaactcagccattctactccttaaaaggctcatactccccattgccagaggtttccaacttctttcccaaagaagtaaagtctattttctcccaacaaaacttgcccaaagatcactttataaaagagaaaaaagcaaagctactttagctttcatctctcttggtctccaccttcttgggccctagagcacttcaggggaaccctagactccaagagtaaacagcactggcctagagaatcaaattcaagcttcctggcaaaatttacatggcctgtcactgcctgtcctcaactcacactcccagcatcaattcccatcaccttctcccatgtcattgcttcacactctaagcctgcactcacagaagctttgtacgttccattttatctcggcaaatattcttcccctcctcttttcctggaaaattactcttgttcttcacaatacaacataaatgccacctccttccttcatgaaacttatctttactcccttctccctgacccatagcacttacactattattgttacagcacttaccacactgtatacatgactgtcttcgctagactctgaacattttaaagaaaaagatcaccccttattcctcttggcaagcctggctcatgccaatgtaaaggcagctagcaggtgttcaatgaacttgataaatgtttttttttagtgatataaattaatgctggaatatcctcacactgtaattaggtaaagctacatactaatgggtgtatgtcacatgtgcattcacagacatatgctagatgctaacagatagacaggacaaagaacaaccggcgaagtgttagaacttgaagcataatatttaatcctcctatttctccttttcgttggtgagaagtggtggcaatcgtaaatgggagatagatactcctagaataagcctagaacactgaagtaggaagaaaaagctcccctttcgcatttcaatataatctgtaaatgacctctttttaaaasttaagagcatacggtttgatagcacctcaaacattgactgtaaactcgatccttaaatgtcacttgtactaataaaatgcaagttctctattcataagtggatttagtgaaccaagcctttctcatttgcaggtagcacttatggttgcaaatgaattttgggaacaaggagatctggagagaacagtgttgcagcaacaacccattgtaagaccttgacataaaaatgtattacttattaaaagttatcaggacaggccgggcgcggtggctcacacctgtaatcccagcactttgggaggctgaggtgggcagatcacgaggtcaaaagatcgagaccatcctgaccaacatggtgtaamcccgtttctactaaaaatacaaaaattagctggycatggtggtgcatgcctgtagtcccagccactcgggaggctgagacaggagaatcacttaaactcagaaggcgaaggctgcagtgagccgagatcgtggcactgcacccagactggagacagagtgagactctgcctcaaaaaaaaaaaaaaaaaaaaaaaagttgtcaggacaaatcagtctgttttgttcatacatcttagaaacctgtcttaaaggatttatttctctttctagcctatgatggacagaaacaaaagagatgaattacctaaacttcaagttggatttattgattttgtttgtacttttgtatataaggtaagtaagcaaattatttgaattaaatacataaacatttggatgagaaattttctttcaaactgtcaccaaaatttagaagtcacccatacggaaagccattggggtatcactgtttctccaaagcagtttgaggttttaccctaatctcattcagggctggaataaaaggagggaactcagatgtgagcgaactgaacacttccttaggcaggcagtaaagacagcacgtgtctctttcccaaacttcataggcccgtggttaaacttatcctagcagctctgagtgctgtaacaattccttacagctcactctctgcatatgaaagatcctgaaaattaactgtatgatttatgtagtttctgacctaaaattccttttaggagttctcacggtttcacaaagaaatcacacctatgctgagtggtcttcagaataacagagtagaatggaaatcactagctgatgagtatgatgcaaagatgaaggtcattgaagaggaggcaaaaaagcaagaaggaggagccgaaaaaggttagatgggctctgtttttgctccctgtaatgtagccagaagctaggctgagcttaatggcatgtgacaaagccataaagagtcaccacaaacagaaaacctgctttactggtgcagactgatcattttaacaggccgattagtggttttcaggtccccctggccctgccacagacaacatcttatgtataactccagatcgaattgaccggtccagttgaagtagaggttggagctaggcttcttcatcttgctagaaggtggctcctctgcagaacactgggtgcttagggataatatgtaaactacagaatctgggggattagagttaggtgagaaaaaagtttttgtcccaacattatgcattagctgtgagaccttgggcagcttgcttaacctcgctgagtttaatattcttctccatgtaatgaggtggttttacagatcttcagcttaaggaagccctacatgtagagtaaggctgaaattgccggtctcccaaatgtctcattgggagatgtttttctggcatgagattcctgtgccattttttttctggcatgaaatttctattcctaaagtcactttgtcaagtttaatgttgtttttggattcttaaaatgcttaggattaactattagttcatcagatggcccaaacatcattttgaaagtggaatgctaatttctgtcttgaaagtttatcactctgaaggttttgtaagcaattgttattgcttaacaaagaaatcatctctatgtggaaaggccctgacatgttccttttaggtggctctattgcatttagtgaaattttaaataattcataggagaaaatatttttcttaacaaagttaargatgtccttcagaataaaagcaggagtttttgactccttgatatccattcacttatgtatttatcagatgtcttctctgtataaagccyggtgttaggcaggccctggggaaagatgggatcctttatcttgaacaatttaccatttggtgggggaactaaacattgtgaaccaatgcacaattaacgatctcgaagaaggcactagtgtgcacatgggccatggagaaggctttcctgaagaatgcttacgctaaccacagaaagcaggcattggggaggaagagtaagaaaatatgtacaaaggcttggagtaggaataagcttggtgcaattgaaaaatttttaagctgatatagctggagtctagagagtaaagagtgcgaagtacatatgaagctggtagtgcaggtagctgccagatactgtattgccttgaaggtgggctaaaaatgttcatgggtcatttgagagatttaaggtaagatatgatttgcatttcaaaacaataagtgatttttaccaagcaagtgaaaagtgagggtatttcttagtactattagatttaacctttatctcaactttattatgaagagatgatcaggtcctttaagtgacattggatatggatctgtattttatttgcacaaaaatttacttctgagtttttttgctactacatagagaattctttgtggactaagatcattattttctatcaccaggcatggagctttgtgcatcaagctcagatttccagactgcattgtctcagtgagaaactaagatgttaactggccaaccattgatcagattctgttttttatttatttaatttatttttttgagacggagtctcactcactctgtcgcccaggctggagtgcaatggcatgatctcagttcattgcaacctgtgcctcccagattcaagcgattctcccacctcagcctcctgagtagctgggattacaggcacatgccaccacactcagctaatttttatatttttagtagagacagggtttcaccatattgaccaggctggtcttgcactcctaatctcaagggatccacccgcctcagcctcccaaagtgctgggattacaggcaggagccactgcacctaacccagattttattttttgaatggaccaactctgaatattaattcaagtttttacatggtcaaacccacagtacttgctaggttaaaatgactaattagtctacaaagttgacactactatcatgggaatgttagaataaaaacactgtatatccactaactcctaataatattgctttccttgattttactagctgctgaagattcaggaggtggtgatgacaaaaagtccaaaacatgtttaatgttgtaatattatctaactggtctaaacttcaratatcattttacctttgaagaaaaccagaaaacattcaaaagaacttcaacaaatcatcacgtaacaggatcttcagaaaaactaccctgtgactatgaagaaaatatatattgctagcccaaaaatcccaggggcaaaataaagttcaacaaaagtgcaaaatatgacaaaaataggtacatttttggtgccaatttattttaaattaaaaaatatgcaatcctgaaactagtcacaaattcttttttaaaacattaattgtatttatttgctaaggctgctataacaaagtaccacagactgggtgcttaaccaatagaaatgtattttctcaaagtcctgggggctggaagttcaagatcaaggagttggcagggttggtttcttgggaggcctctcaacttggtttgcagatggccatcttctccctgtgtcttcacatggtcttccctctgtgtgtctgtgtcctaatctccttttcttataaggactccagtaggactggattagggcctacccatgtgacctcattttagtcttaattacctcgttaatggccttatctccaaatacagtcacattctgaggtactggggattggggcttaaatatatgaaatgggtgaggggtgggggagacacaattcacccataacattcgtaactgtgattcatacctcaagccactccccgaactaaaatctctcaacatcttaataaaagagtaaacgcagtatagaatgtatagtgttgtaaatatgatatagaaaataatgatgtcattttattcaacgtcattccatctgaaatgcttatctcttttctctacttttacccttgataatagaatgatgaagaccaaactattttttggcaatatttattaaaactatgcctttgacctacactcctccttcaaagtttgaaatcaattattttgggtgtaactaagaatattttttacagttcagaactattcttttcattaaaaagattatcaatgcacaagattctaactggataatcataatgcaagttaaagcagctaatgaatattatgcgttaagaagcatgtgattggattatgcaagaaccttatcaaaaatagtacagaaaaacttcaaccaagatgactttctaaaaatgattaatagacctaccaggcattctaaatattaaattgttaagacaaactaagggcaatcaactacttcgactgcatggtatatgtctgtctggatattcgagaaatttaagatttcttcttttacttatctataatcatagataaaattagaaaatagaataatatagttatgccatatattttatcatagaatttttttgtcacaagctatctacagtctaaagaattgaacatcaatgaacctatatattttgtaatagacaagataatgttcaattttgagcagccaagaaatgaatcgccatttatttttataagttaggtacttagaattgtcagactgcttctctcacattagaatgtaaaatttatgaggaaagattttgtctattttgtctgttttgttcacagctctatctcggcacctagagcagtgcctggcacaaggtaggcactcagtaatatgaatgaatactatgtgaataaatgttacaacaaacagatataaataaggtatgacagtaagtcatatgtacactcaaatgagtattgtttattaaagtaatcaacttagctaagtgatgcatgctcccttatttccattgcttaaaataattttgaaattccacttccagaagcactattattttaaaaaccacgtaagaaacgttattcctttagccctatgtaattttagaccccaaaacatcagtcagctcaaacaacttcccctccttagtcaccagaaattgtattgagggtagagatgtccaccactgaaggtctgccaaatacatgaactctgcataagagcaagtataagaaggcctaacttcaacacccccagaccagtggtctgctgaccaccactgaccgcactatagcaaagtttgagataggtgtgtaggagaattactttttaaactcatcatgttagaggccttttcaagactccttaaaaacataactcccattatctgtcactgtgtatgcatggattaagtattgtgattttatataaatttataaatgagcctgatgtcataaatctacttgaaataccaaatacactgatctatttttaaagggtctttagatattcttcctagttaaattcctaattttaattttgcaggaattttactttctgacaaccactaaacaatggacatatttttaccataagaatgtttaactgcatatattctactactaatatcagtcttgcggctggacatttcaaacactttttcaccggaaatacagattcatttttacacactacaagtagtgaggtgaaaaaaaacaatttattcaagaagtgaggggactatcaaacaatgttaaacactgataaacccaacactgatttacttttctgaaacaggttcagaaatgattgcataattacttcctagatggttcctttacagccatgcccagctcagtgcctcacatataatagaagcctgataaatatttgtggaattaatgaataactgtttaataaaaggaaaatctctgataataaccattttaaaatgataccaaattactcattttgcagtttattgccaatcattccgtgtttaaatgttatttaaaatagtatatcttcaataaaatacttgcttatgttcagttcattttctatatgtcctttctcttattcatcaagtcaagcatcttctcctatatctatccatctatttgctctttataaaagcagatctttgctagttttcagaaatcaataaatccttttgaaaatctgatttttgaaaatttgaaatttatggacttttcctccaaaaaacatacacagaagtttgcacagattctaaaaaggcttggatctcctgaagcacctccatagacccttgcgactaggaccttatgttaagaagttacattttatatttctgcatagaagttctattagtccattttcacactgctgataaagacataccagagactggggaagaaaaagaggtttaattggacttacagttccacatggctgggaaagcctcagagtcatggtgggaggcaaaaggcacttcttacatggcagcagcaaaagaaaatgagaaggatgcaaaagcagaagcccctgataaaaccatcagatcttgtgagacttattcactaccacaagaacaatatgggggaaaccgcccccttgattcaaattatctctcactggatccctcctataaaatgtgggaattatgggagtacacattcaagatgagatttgggtggggacacagagccaaaccatatcagaggtatattcatatttgcatgagtatatctgaggcaagatacatgcacatagtattattcagttaaattatcttactgcataatctctgccggggaggcaatttttgtgaacacatgaactgttttagactactgggacctcactggctccctgtggtaataatttacttaatagtaaattatccacaggctaggaagtcaaatttgattataacaaactctcttaagtggtagaggttaagaaggaagcaagagacaggcaagcaaaaaacctcaaaaagcagctggaaataggtggtaatgggagagcaggtacttaaaagaagggtgccagtttatcaatgggaaagaaagaagttaaagacatacataatatactttaatcctagtaatttaaaataattggcagagcatggtggctcacacctgtaatcccagcactctgggaggccagggtgggaggaatgcataaggccaggagtttgaataccagcctgggcaacacaggaggactccgtttctacaaaagaaaaaaatgaaaaacaaacaaatccagtattggtggctctaaaaaagagaaaaagaagaaataataaaataaaataatgaaggcaagagaagatacataatgaaggcagtgaaaaaaaacctacaaaatgtaggaacaatggaatctgtccagctctatcctctaggagctacaaataaaacagaattgtagataagcaattgaaaagatatttaaaggacaggaaagtctttaattgaactaatgaacttccaaagcctctgacattctgagagaacctggatttttatttccaaagacaaaccacacaagctgtaacttgcagataaaaacttatatggaatttcaaattgcatgaagtttaaaacttcatgaagtttcacattaaggagcggaggcttctctctctcgtctcatagaaacaaatcctgaaaatactcatcaaattcttcttccctatttaaaaaaaaaagcatacttaagatcaatagagtaaaaaaattactacatgatacattatatgagattaataaaaataaaatactttaagtcaacatattggctgattctgctatatatcaatatatcgccatgattcagccatcaaataattcttagtttctagaataatcataactatacccagattgattaaaataaaaatatttcatatggtggcacctctccctaaatgtattacctaaaattttgctttgaaatacttgtgaaatgtcattgcttctctttactttgtgggcttactttataacttctctgttcattctcattttaaattatagtctgctcaagaagtgaataaaaaagaaactatttttaaggaaaaatgtaagcctaagttatattggggaataactaaggggaattgggtaaatctccttaggctgtagtttttttactacactgagcatagtaaatatattatgtatttgtaacagtaaatattattattttactttttaaaagaccagtgggatagcagtatagaagtgtacttcccatgcaagggattcccttgcataggtttatgataatcacagtatgatggaataggcttctctggaagcttaggaaacagccatctctgaagaaatccaagcaaggaccagaggttcatctgttaaagtgaactgatgaaagatttatttaccaggaggaagctggatgtgttggctgcttatgacaatggctgggaataagctctaatcttaccaggctaggcagtccttggcattaaatagatcaccatgatgttgtatttttccattaataaagctgtggttatagcttcctaaactgattgaaaaggtacatattctctattaatatcagcacttactgtgatttttcatctgtctctggtagtggacccttccaaagttcagattctgaagcackttcttcctcatcagagtttcctgttcatttaaaaaagatgatttttaaaaacctattatacttaaagcacattttgaattattcgccaatacaattaactttttatttaactcagcttcaacttttatgactctctagaaatttaattcactctcacaggtacaataaattcttttaaaacatatataaataagccaagggttaccaaagaatctcagcaaaaaggccaaggattttaagtctcatcgaaacttctctaagttacactgagttaaagtagcaattccaatatcaactcttgtaagtcaattatctcttgcaatatagttgtctctgatctagtttcttctttttcttggttacacagaagacacgcaagttaagatttacatttgtagagaacatgtttacattaggattagtaccttaagaactgagctagtatgtaagaccagctagttaaattattttaaaaaaaattgtcagacattttaaaaaaccaatgctgattacataatgagaagaagcctgtttcagggaagaaactggcattctcacacattgctgggagtgaaaattctgtaaacctttttctggagaaaaatctggcaatatagatcagtttaaaacgcataccctttgaccagcaatgctgcttttaggaatttgattacttacatacataaataagcacctctgatacatatgtacaaagatgcacactgtgtaacaacaacaacaaaaaacctaattccccaccaattagggattaaggactggttaaataaatactatacagctgtttaaaaacattagcatatctgtatgtactgcaatagaaaaatgtccattctatatcaaatttttaaaaagttacaaaaagtatgcatagtataatagatatgttaaaaacatatgcacatcatatacatacatgtaattttatgtatgtattgtaagtttgcaaaagccaaccaaatttaactgattatattacctgtgggcctggaatacttttactttctattttaaacattttcaaattgtttgtattttaaacaatgagcatgaattaccttcaaaatcagtaaaaacaataaagacattttattaaagatgacaaaatagatatgtttcaaataaatcacctgtattagtcaactaaaaatttaaaaatactg

SEQ ID NO: 95882 - DNA, 104758 bp, Homo sapiens
  misc_feature (1)...(104758): n = A,T,C or G
aaatcagttaaaactatcagtaaagtagatttaccgccataatgtgggtgggcctaaatcaatcagttgatggtcttagttaaaaacagatggatgttccctaagtaagagcgaattctgcctctagactgtcttcagacatggaagatagctcttccctaggtctccagcctgtcagactactctgcaggttttggaattgcaagcccacgcatcatgaggtctacaccttaaaataaatctcattttcactatccatacaaatgttattggttctttttctctgaagaaaaaactctgaagtatatactatttaacatttccattattaaaaaaaaatgccatgagttcctgcaaagggcaattggaatttgaaatgaaacacagtgtcagttacattaactccccaaacaataaaatattcaggtataaaactaattaaatatgtataagatccacatgaggaaaggtaaaaaaaaagtaatgaaataaattaaagaacagctaaataaatggagagatagtccatattcatggctagaaatattcaaactatccagatgacattccttcccaacgtgatacatagattcagtgcaagctcaatcaaaatcccaataagatttttttggatatcaagaaactcattcaaagccataaaaaatgatgagttcatgtcctttgtaggggcatggatgaagctggaaaccatcattctcagcaaactatcgcaaggacaaaaaaacaaacaccgcatgttctcactcactcataggtgggaattgagcaatgagaacacatggacacaggaaggggaacatcacataccggggcctgttgtggggtgggggggaggggggagggatagcattaggagatatacctaatgttaaatgaggagttaatgggtgcagcacaccaacatggcacatgtgtgcatatgtaacaaacctgcacgttgtgcacatgtaccctaaaacttaaagtataataaataaataaataaaaaagaaaaaagaaactcattccaaagattacacagagaggcaaaagacccagaatagctaacacaatattaaaggaaaagaataaagttggaagactgatgctaccctatttcaggacttactataaagcttcagcagtcaagagagtgtggtattggtgaaagaatagacaaatagatcaatggaagacaatagaaagcacaggatagcccacccaaatatatttaaccttttgtttctttgacaaagaagcaaagtcaatacaatggagagaagacagctttttcaacaaatggtgctgaaacaattagacattgacatgataaaaaaataataatccagacacaaactttgcatgattcacaaaacttaactcaaaatagattatagacctaaacagaaaatgataaaatgcctaaaaggtaacatatcttaaaaatctagtttatcttaggtttagattttaaatacaacatcaaaggaatcatcaataaaataattaatatgttggacttcattaaaattaaaaccctctgttctgtgaaagaaactgtcaagagaatgaaaagacaagccacaaactgagagaaaatattttcaaaaagagatgtgataaagaactgttatccacaatatagaaagaactcttaaaactcaagagtaagaaaatgaacctgattaaaaacctgagcaaaagttctgaacagacaccttaccatagaagataaacatgtgtaaattgctcaacatcatataatatcagggaattgcaaattaaaacaacagtaagatacaactactacacatctgatataatggtcaaaatctaaaccaatacaacagcaaatgttggcaaggatatgaaacaacaaggactctcattcattgctgatgggaatgcaaaatggtacagccaccttggaagtcactttggcagtgtctttcaaaactagacatattcttaccatataatccaacaatcttatttatttctacttacccaactgggttgaaagctttacatctacacagaaaactgtacacagatgtttacagcagccttattcataattgcccaaacttgaaagcaataaagatgtccttcagtaagtgagtggataaactttgatatatccatataatgaattttatttagtgctaaaataaaatggactttcaagccatgaaaaaaaatttgtttttcaagccatgaaaataatggagcatattattaagttaaagaatccaatcagaaaaagctacatactctatgattccaactatatgacacttgaaaaggcaacactgtggagacagtaaaaacattagggaagtcagagcctggggtgaccgggagtgagaaagaagcatgaataatcagattacagaggatgtttagggcagtgacactaatttgtattatactataatggtgaatatatgttcagtatatatttggcaaaacccataaaatgtgcaacaccaagaatgaatcctaatatgacctatgtactgtaggtgataatgatatgtacatgtagtttcattgaatgtaaaaaaagaaatgtactgctctgatgaggaatgttgatagggagactgagtatggggagaaggtagagttatatgggaactctctattttctgttcaattttgccataaacctaaatgttttctaaaaaaaaaaaagtctattaaaaatgtcatgggtcattaaaaactccaccatgagactgcaagtatctattcatttcttgccagctagatttgagagtacagccagcaatgaaaacatgaatttacattaagtcaaaggataaagtatcattttaaaaccagctgccattactcacattatttatttataggctattgtataattgtagaattgtgctgaataaagacaaatatattctctttattgaagaacttacaatccaaagatcaaatgaaaatttagaaacaatcttatttgctcaggagcatcaaactaagcattctaatagaagaagttaattccaaaagacttctttatagtcttttggtgctcaggaacatcaaactaagcattctaatagaagttaattccaaaagactttttatccaatatttatagttcttgcacctatttacatattgagaaaaaaccatgctgtcctcacttttgtctaagtattggcctgtatggcttctttttaattggcaaattataatggctatatatttaacgaatctaacaatattaaacaaatggcattcaattacactccaaacactaaattgctttaatttgggaagaagaattcctggagtctcgctgaacagttatcagtcattcagaattgctcgccttaatataaaaagttctgtacttaaaaaattcagaaacagcagcattatacaattggagagttcacttatttttcttctggacatttaaatttgtcttatgtgttcctataactagttcttgattgctttcgtttcgctctttttttttttttttttcttttctttttttgtttgtttgtttgttttttcctgtttgggctaggtaagtagtttcccctaatgtaatttaaagcttaatatagattatactcactttcctcttgaagattttcttgtggctttctcattacagaagactgttccacactctggagccatagaatattatgagtacaccgaaacttttggaccagcactctcccttaccactttcccttctaacagtactgagccacttcaaagttgccccaaagcaccagagttttattactctctggagttgcgcatactcctttttccacctgcaatgttctatcctccctctgcttggcttacttccttgtcagctttgaaaacaggagtctgtgtgtccccttcacccggaaactcatcttccgggcttcaaaaggcttaaacaccccatctgcttcaacccaggagcttactcagataccatatatattttaaatgatgtttctgattcatgttgccatactgtaaattattatttttaaaagatgccccctttgagtgagtaggatttgtgtctgactagatgctaagttttattcatctttgtgttcccatctccgcacacattgcctgccccataaccattgcttaagaaataatgagtttaatgaaacgatgcatattactctatccctgacagagagtgatgttttacctataatctaaaatatagttgtctactgtttaaaaatcaaagtttatccttgagaatttagcatcctaaccatgcatccctctcccacccgacccctgccctcagccccggatcccttttaacttaaataagaagctgttttattctggcagtttttgccagaagaaaagtgagtctaacagaagtcaatctaacagaaatgcattaatgcaggctggatttgcctagacatcaataaactcgaaaggctccctgtgggccacttgtagtgtcaataaacgttcgtaattacttgctccttggagcatttttatacccgaccccgttcgctgtgctgcaaagaggaaattcaagatctcggaagttcttaacttcttaaactctagaggaagtatggtaaacactggcgggaaccttgggtttttaagcaaagatgctggctgttttcgttgctattttaagctgtcaggcgacaagcaactcagaattccccttcttacttccggcgggagggaagattggaattgggcctcatcatttctgagcgtgaaaaaccgctgaagctactgttcaacctgaaggaacacggaattcaactggagagaaaccctggcgaccagggagctggggaccggcgcatatagatgagggaaatcctggcttccagacactgtctcatgctagaggtgcctcccgacctaccagccaacagtaaagaccggaaccaaggcgtggtactagcagagtagcaagcatctctcccaatgagggcaacgactggaggatggtggagaggtactcagagtgaacaatcgaacacagaactcttgaaaagtgtccctgccacccaatacaagtacgaaaaatggtgggacggaggagaggtgacaatcagaggctatatatataattgagacttttagagaggactttgctcttccttcctcccctcccttttctttcctttctttctttccttccttccttggtatccgaatgtgtgtgggtgtacttgcgtttaaaagagaggtccatggtagctgcttttttttcagaactctgtttctccgcaatgaagtttaagtgggattggagtttccttgacttctgcgtgaggagtttccaaatggcaatgaaagggaggcgcataaatatccataaagttcctaatgacacctctatcatcacttgtttcctgcagaatcctgagccagggtcgtcgtccaccacccatgcagagtgggcccatcggctaacaggttcatgtgtgtatttgcactttccagattgagtaataaaagtcttcttccttccaccgccgtccccacccccgcaccccgtttcactccaccttggagggcgtgtttttgcgtgtgagggtgtgtgtttagcaaaagcgattgaaagaaggtactcttcttgcaatccacccctagctctacctgaagcattcctctggcgggacgcttttgtaatctgtccccaggcgaggtgccctctcacctagatgcggatagactatcttggagctcccaggtccagagagctgatgctttgatgtcccaggagagtgtgtgtgattctgcgtgtacgtgtgtgtgcatatgtatgtatgtgtgtatgtatgtatatgtgtatgtgcgcgagctcgcaggcgcgtagcactgtgagcttcctctcccggcacagagcaggcagagccggggacgttactctccaagcagcctccgccccctcagcctggtgattggctttgcgcagcgtttatctcctagcaagagggaagggccagtgacgcccccgaacccagctgcagaagctgccgccacctccaatgcacaaggtgtctcatctgaaaagaaacctgagccccagggaggcggcgcggagcgaccctggcagagctggcgcaaacagggcgagaggtcgctgggcagcgttcgaggaccagagggagctcggccacagaagaccccagygatctgatcccgggatcccggctccaagctctcctcgcattttacagatttcacccccgcgactatctccccaaaacggagcctttatatcaagagaaggtgcgggagctggggcaaccaggactttctcgggcacccaagatgcgctccattaggaagaggtggacgatctgcacaataagtctgctcctgatcttttataagacaaaagaaatagcaagaactgaggagcaccaggagacgcaactcatcgggtaaatgcaaagcttcatttcaggatatgacaaaaagtcaagccataaatgaaatgtgaatatagagggtagagtgatggttaggatagcatgtgtgtttgtttgagcttgcgcgtggttagtgtcatgaattaaataacaaaggctgttgttgagatgtgcgtgcttctctaagctgttcccagtatgagttcaacttgctctgtgtggttgtggtgacagttgtgttggccctgggtgctctctcgccaaaggagaagtcactgcagaagtgtcaacaaagaacgtgtgtccttgtccttttaatctgtgggcagaactcaagagaaatgtctttattcaccaaacggttgcctgttttcaatgtcctatcacctaaggagatactggagatagatggtttctcgaagggctgaagttaaagcttagaaagcaggaaataggtatactctgtttctctactttttttttttctatttgacgttggatagattaatgtgttataatttgaattagaaactccagtaccactaaggatacttccttatttgttcttctacggctaaaacgcatgggcgtcatggttacagttttagaaagaaactgggtactgtagcttcacacagactatatttctgctattttttttagtttgtctagatgagttcagactctcccccgccccactaagttctctaaatatcacacttccttccacccgctggcctctgtgtctttgaagtttacccaggaggtggtgcaactttgtgttgctgacatagcttggaaggctttttctgaggatgtgaacctgattgtcaactstattcaaagtcctgtttcggaaatcctccctgttccggtttggaggcgtcctctatcagaaactacacaccagcagagatgcctgcccagtttatatttttctctgacattgattaaaacaaagaaaacagcccttgcgtgtgtgtgtatgtgtgtgtgagagagagagagatgggactgctaacacacacacatgctcttaaacttcctgcactccatttcttaatattcctgctccctaggtaataagcatttatttaagcgagcaagatgcaggttgatccttacagaaggacttgctattctgtagaaaaccaggaaaacagtagcacagtcaaagcggactggaagagaatgaaaaagctagcaaggaatgggctggaatggtcgtcatgcatcaacgaatctatacatggtctattctgagggggtaaaaaagaccggtatgaggtcgtttacacaagactgggtggcttgaaaatccaatctagctcagttgttagaaaagcaggactttgggcaggggcgtgggcatcccttgcagacctgtgcttgccaggcagacaaaggggtctttagaaaggtgatgaatgggcgcatggggctccgatgagaggcagaggctagagcttgagggtcgaggctctttgttccctcccgggccgtgggctaggaggataagcctgatcccagacaaagcggccaaggctcactaggactccgagggttcgggcccttggctgggaccctggagagcaggagtgggcggagcgagtgagaagagggtcgccagatactgccgaggtgtccatctccgagcctccctaaaccgtggccaggaaaaggagcgcacctcgagtccctgcggggaagyggagccgggacactccgcattgcacgggtgtcatttctcctgtggccctttcctggacgttgccggctggtgggcgcagccctaggcgttaaggaagaggaggcgggcactggcgcggcggttgagctagtcgggctgggcttttgcccgcatccttttcaagctgaagcagtttcctcccagcttgactgagaaggcgttggggcaggcgcttgagtaaaccaaacaggaagagaggcgcgcaccggggttatcccctgctgccagagcgccggcggcgagggggaaagaatgagtgagaagatagggggaaacctttattgcaggactcaggctcttttggtccctcccctccttccacccccaccccacccccaccccccacccaaagtcactttcaaagctcagtcggcaactggctcctccttcttaatcaaaacccgcaattacagtggggcaaggcagagggctggccgcgaacgtcgcgcttacacccgtgccctgtagcgtcctgactgccttggtctcctgagagaccaagactgtgcaaggagttggagctgccaggaacaatgcgagggcagctaggctccctgagcactttcctttttctccaggatgaaaggttcgtggaaaagcttgtgacccgagctcattatttcgtttcaactcccaaacagcgcttctggtggaggagttgactcataaaaccatcaaatcatctcattgactgtctttctacccaagccacgtggagaggccagttttgagttttgagtaaactggaatggaggttcggctccagatcccggtccagtattcaagtgaggtaaccaaggcagtctctggcctttggggggcactgcgagccttgtggcttggcagcagtttcaaagaagggccttccatagtccttgaatcttgcatcactaccccagattcatatttagcttttctgctaccaattttgcaatacaaggcagttcctttatcccttcgacccttcccccccgcaaatgggggtcccatctatagttactcttacagtatgccacaatactgagcagtcataccacgcagatggaaaaatagaaaaccagcacaaccttctcaccaaccatccacattctcatatctccaaaggaatacctgcgacatgtttttttaaatacataaggaattgttccagcataggtcaagtaatgattattgaacatctaaaattcatatttccttccataaaagcctattagttaataaagtttaagttgaagagcagtgaaggcattaagtggtgtgttcttgactaactttactttcttagtagacctcacagttggcttatgacttaattagctctttgtgcacttttgggtataactggaaatgtgttaatgtaaggctcccacaagtaaaatatgtaagcatcctcatttaatgagataatatatttgaaagtgtaacataaactttaatgtcatataaatatttgttttgttagtccttaaatcttgctacacactatttttctggttgactacaaatgagactaacttacttttcttattatccaaagatctctcttataatttgactatgtactttaggttgtattactaaataatcaacaatattagttctaaaacctatgataaaattgaaagtggaaataaatatttttacttagagtattaccattgacagcaaagttagtcccagtttgttctaggatgaaacacaacctcgtgagtgcagaaatctagaatttgcactttacttcacatttcacatttcacaattctactaaaactcataaattaaggtagaaactatcatctttatttttagttgtttgacacttaggtaatgaaaatacaaaatggcctgctgtgtgtattcaggcttagtttcatgcaagttctttatttaaatttttatattaaagaggaagtttaacctagttaaaagggaacaaatacattcaaaagccaagtcatgaagagtttcagtagggtggaatacggggcttttgagacctaataccatgaagtgaaattaatcatatgtcttacgtactgcaaaactaatgaagtaaattgtggtgaagcctggaaatatttgtagacactaggttacctaaaaaatgattaattcctgccactggtatcacatagatgaccatcttagtgaatttttctttgatccaaataagcagggatcctttgtattatattgatttatgtggagtgatttcgttgatgtgtttcgctattttccttttaaaagtacatattgaatcttcttgtagatgatcctatgcaataaatgttttcagtgcagctgttcaaaagtcatgtctgatctggaatgagagacaagtaggggggtggcaacatccttcaagcttcrcattcatgggaaggaagagccttttctgagacagaatgctaccaaggtcatgagtgaaacatcccatgggacccatttaactttatacagagaaatttactctagagcttcagattgtactaagtttgaccttctcccacactgactataaaaagtgtgactagttgtagatattttcattcaaaattctttccagtgatgaaagtctgaaatttggcttatcaccagctcaatgaaagcaattcaaacagcggagtaaaatggtagcattttattcatagaacactgatttaaactttttaaatcttggatattctgaaaaggcttggcacaactgaaaacatcatatcaaacattctgccatgtaaaaatgtatctgtatttctaggtcaatgaagcaatcatctatagattatttatgtagttaattatttagtttttagagacagggacttgtgatgttacccaggctggtctctaactcctaggatcaagtaatccccccacctcagcctcctgagtaggcactgccaaccatacccagctcttccacacatcttaaagagtgcaagcccatgcatatttttatttctcctatgaaagtttattggtggtgaaaataattattataatgatatcaatctgtggttagaaaaagatgacactgatacatcaattaataaggtgatgattagaaatataccttatccacagaaatagtgatagtttgcacctgaaatcatgtagtcatatctcccaaagtgtgaacgttagcttctgtgtataaccacatttttattcataagtagctattatcattatgaatataatataaaaattgacttctgggccgatggtcagtaaagcacaccccgtgttttctggcatcctaaatgctccctgtaaggcaatcattatttgccatgcataggcatgcaaacgtatcattttcatcagtaggatagtttaagatattaatttttatagaattatgaatttcacagggagtagcagcctatgatgatgctttgagctgcttcagatttaagstaacatgtttaaaaaagaatgcaaaccaaaataccaaactataaggcttcaattacagaattcatcgaatagctgttacacaggcaatgtttccattgatactaggagaggattgcctgcattaaaaaaacacagttttagactttgttatggagcaaatagtcatgttattttttaactatatttttgactttctaagaagtaaaaggcgatgtaaagaaataaatacaaatattcaaagggctatggttactattcgtataccataagaagtagctttttgattttctgagtctgggtttacatttataaagtacaagaaaatggtctattgaataatgaatttattcagatataaatgttttaatggcatgcatgctattacaggtatctgccagcatcatcactcccaccagcacctcagctagtaccatgccacatgatatactagcttgacactattggttgcagggaggtagtttttttaatgtaagagaaaatactactaataatgactacttaatgagttttctctctactataatctctgtctctccaccaactgtcagggaagtgactcgttgagatgttttgaaatcaatgcaatttttgaaaaattacttttacatgcagagccttacttgatcctcacaaagccattgtatattacataaagttattgtaattttcaaggtaaggtaagactactgtggcttagaaagagaatagagtctaggaactcaagcaagtcatagaatcacaaacatgcccagatcacctgatattccaagttattcttgcttcaaaacagaakccccttctattatgcatatatgccttctgtaaaaatgaaattacaatcttaggaatcacaattatacagatggaggagcacttacaaaacattctgtctctgttgtctaaacagagctagtgaggaaacagagcttatttgttttatcttattttagttgccaaacaataattgtatatatttacgggatacaatgtgaagtttctacacaagtatacactttgtaatgataagatcaggctaattagcatatccatcacctcaaaagcatgtcacttctttgtagtgtgaacatttaaaatctcttggagctacttaaaaatatacaatattattaactatagtcactgtgttgtgcaacagaacttattcctcccgtctaagtgtgaaattttgtacctattgaccaatttctccccattccccattcactctttcttcccaatattctgttctctacttctatgatttccactgttttagaatcaatatataagtgcgattataaggtatttatctctatgttttacacttattcacttaccttaaggtcctctaggttcattcatgttagcacaaatggcaggattttgytctttttaagggctgaatagtactccattggtatatataccacattttcgttatctattcctctgttaatggacagttatattatttctatatcttagctattgtgaataatggtacaatgaacttgggactgcaagcatctctttgacatcctgatttcaattcctttgkgtatatgcccagaggagagattgctgaattatgtaattctgtctttatatttggtgattttttttctttaagtaccatagagatctttttttattcagaaattgtttaatttcaaaaatattacgtgtagattcttgtcctgatagtcatattcacttaatcctcataacacctttcatcatgcttgcgtatttccttctaacttgtaggggaaaaagtatctaaaattcatcaccagtaattaattcaaattatgtactgtgctgtatacacaaaatgtttcttactttcacaaagctggcaattttgttttgtttcagagatggtgaattgtctttgagtcggtcacttgtcaatagctctgataaaatcattcgaaaggctggctcttcaatcttccagcacaatgtagaaggttggaaaatcaattcctctttggtcctagagataaggtgagtttctttactaaggcataataaatttcacatcatgttctcaaatacgttgggcttggcaaacttgtattcaacactggatttatggtttaagtatgaatacttaaataaaagaatgaaccagctctatttaatgttgctcactgaagaatatgaaaccataaaactgaaatcattatatagtcagagatttaaggatgaatatgtgagttttgaatatattgtctttatactaatggaataaaatattcagcagagtactgatatttaacatacttcactcaattactcaggatggacatatattttaagaattatctttaacttccctattgagtcttcattctgcttttgggttttctcaactagctgaaaattagagcctattacactctattgtgctgacgattataaataaattagtcttatcctgtgaatgagtatttctgtgtgggctcatgttttaaaaattggataaaaatcagaaaataagctttctagattactgacttcttctttgtaagactagtcattttagctgaaacccactcttgaactcatactccatgcctacgtttatccagtatgtaattttcttctgatataaacctgttactaataagaaagctagagtcataccttcttaattatggaggaaacaggaagattgttttttctttatagttacattgcattactgtattggttggtatatttgaatcacagcatttcagtaaacaagaactcactaaaagtgtgaaagaatacattcgttatataataaaataatccaaaagtcaattaatagttagcattaacacacagattttataggtgtagcttagtgactaagatataaggggctaattaattttcctgggtttctacctactcacttcttgtattatacctacctttaatgtagattataagaaatttgaaggaagagtctattagtctattacactcatctttagagtatgcacagaaatttcacacaatgttttggagcaaagataattacagcatgttgaaatttacttgaacgaatgtctggaaattttaaaaatatgggcatcagggcgatgtaggaatagtattactactttggtttaaaggtttgaaattgactgggaagggaaacaggaatcaaatcatggcaatgtcaagtggtgtgtgtttgtttgcttttagtttggtgggagctttctatattcatgtgcctcctacaagaatgaatagatgagtagagtctgatgacagagctcataaatcaatgacttctgggtagaatatggccagcaagaaaaatttatttccactggataaataaaaaagaaaccttaaagccaatattaaaaaccaggaggctttaaaataaaagtacagatttccataaactcttgagaaattgaatgatttgacaactctgaatctgtactcttcctaaggtttagctggttaaagctgacactagtcatggtctctcaagtttgacattttcatacctggagctcacatctttcatgatacctgtcaagtgcattcttctctgtcgcatatccccatccttatatttgaatttagaaaccctgtgagagatgagataattatgaggaaaaagtcacaagatgtgagttgatgtggggttataaacacagatatactttggtttagaatggagtaaagattcatatttcttgaaggtatattggaaagagagagagataggtgattaaatagcaaaaatttgatctgtaagcagaaaaataactttcaaattggatggcttagcaagaaaggagccaattaaggctatagagatctggtaaagaaacctgatggaagaaagtaaaataaaatgttgtaatagtttaactagtatatctagccatgctaaataatgtgtcagatagcaaaaaatctaataagtaaattaaataagtaattgacactagttcaagtattatatctggtcatgcctttcctaatagctatataaaaatcaaatactataaataggctatatacattttgctattaataacatattcaagtgaagggtagtaaacctaacttgacccaaaagattcgtattacaattttacaaatcaatgagcattacattcatgtatttgagggtgatctattttcaattataatagctgatagtatgaatgaaatgttagtactatttttgtatggttctccttaacagattaaagaaataaacaataaaacaatgaacaaatgttgaataatacatacaaagttgtcacttccttgaaaggaaaggataatttgtaaaaccattattgtacaatgtgcaaagagttcataaaaattagaattggctatagcagaaatgactagtgagtattaatcagtttgatacctgtaataaaaaaatttagaatatgaaaatatctgactgttggcttagcttttgcaaatatttttgaaaagatattagaaactaattatggatcatttattattattgttattattttctttcttcctcacttttctggcatttaagaatttccatatcactttgggtcagtgattgggtgtgggtaaattttaaaagtgttttcaaaattctacttttaagtttttgtttatttttatttttatttattttttattttactttaagttccaggatgtgtgcagagcatgcaggtttgttacacaggtacatatgtgccatggtggtttgctgcacctatcaacccctcatctaggttttaagccctgcatgcataaagtatttgtcctaatgctctcctccccttgtccatcacctcccgacaggcccgggtgtgtgatggtcccctccctgtgtccatgtgttctcattgttcaactctcacttgtgattgagaacattaagacattatttccaaccatttttttatcttactgattcaactatcattataaatctttgaaatttaaaaatcttattaaacttataatgttcttattatattcctaataattgtccgcataataaaatgtgaaaacagttcctgagataatttttttttacatttgtggatatgattttcaaccctattactaatccctttgttcccatatgccttattttattttcataagcacaccaagaatcggttcatatgtattcatcaaacaactgtacttctatgcaattgtctatgagagatggttctgttacttcactgtactttgaggattcacgatatatggagtttatgcattctacagctaactttgcactcaaaataattatcttagttttaagccttaatattgttgataaaagtttgttctttattattataagctaagaaataacacatttaagatgcattaaatgttgtgaataaatctgtgaacatcgtacgggagattatgtagttatgtccaatacttgcaacttgactttttttccatatttggattatttattttctttttttgttattgttttttacatgttgactagaaaccccgaaaagtgcaaacatcaattatagatgtatagaaatgtacaaatgtacacatcaggatagctttatcacatcataattagaaaaaatatttcagctcttagtgtcatgatatatcaataatctgaaatacataaaacctgcaggttaactaaacataattgcaaatttatatatgcttaactgacaagaaaaatttcctattgcatacatagatttactttacaaaaacttctacatacaatgtttatactatcttctacttgctttgatcaataagttaccgatagagctaatcttgggtcacaaagcttattagtggcagtgtcaagattcaaacccagacctcctgactgaggaaccaggaccttataaaataattttgttaagaatatattttagtacccaaatgtatattattaaaatttatcattatggaataaatgattctctttgctctaaaataacaaaagtcatttttcattcaacattaccaaattctggaccaaatatcaaatggcactctagggtgtaaattaaactaaaaatgctcttcatcaaatattgkgggacaattttgccttttcatttgttgtgtttaagattttttttgacactaagatgtctttcccataactgctaggacttagaaatcctaaataaggtacagttaaacgttttattcttccagagctttaagacaagttgccttgcaaaaataatctttcaaaacaaacaaataaaaaatgtgtgttctctctgtttttttgtaggcataatgaaacactgggcattttttagttttactttttattttcttttagtgaactgggtcagtactaacttaatttacagtgatttttttttgtagtcagtgtctaaagtttgcaaaaactgattcctaacatatgtatcatagcctaatttgcttctcaacttgtgatacattccacctataagattcgtcacacagtattttctgatggagttaacaatgtcatttagattaaattttagttgcaactgtgtgcttattattgccaagaaacccacagagaagagtggcacttggtgataacttagttatatttaacatttcacgagtgaaaacttgttactaaacaatgtttagtaaattaattttctgggattctgcagttgctatttcaagtgataggtgacrttgaaagggaagttctagttgaaaattcagttaaaagtttctgggtagaactctacttgttgtcagttcaacagtccaaaccaacctttcagtttaaggctgatattgcctaacaaaaaaaatagtttttatgactaagatatttagtttcactgaaaatgaaacagattttcagattccttcagttatctttaatgttaaaatagttgctcaatttaggtgtttgcttatctaatgaggattcaaaagttgaattaggatcacaaaatgacagttaaagacctgtgaagggtctttttttgtttgttcttttgagtcatgcacagaaaacacaaccccttgctttgaatattgggtaataacttgaccacgtactaggaaaacttgtactggtaaagcatgcatattaagcattagcttttgttgattcatgtgtctctagatagagcgcagatattaaagccagttttctttctacctctctcatttctgaaataattttgtttgacctgctgttaaacaaaaatttctatcaattgtcttcttagcaaaagcatatatgttctccttggtgacatgttgttgtttcagttcagtttaagtacaggagttttctatgcttccaatgacatttagctaattatacttgaattttttttcatatttatagtctgaacaacaactagacttagcaaattcacaaagcttttaattcgccattacatctacaatctaaaaactgtttgcactaggagataaaaaactaaccttttcttactgtttccaaaaattatgaagcacttaagtcataatattattcactcatagtaattactttcagtctttcttggatcctataaatggaatcttaactcagataattttccatacgtagaagacctaaaacagaaactgaaagtttggttcaggaataagaaaaaacaaacaaacaaacaaacccagagtcactcaagtttacctctttttctttttactttgtaaaatatcgaattccaagttttgcctaagttttttgtgtttttatattttgattagtctatgtgagttggtagtcttttctgttttgaaatcacttttactattttcactgcttcagttgaaaaaatactgctgagcctataacaacattggaaaaacacataattacaatctgcatttagtaattatttatcttattaagcattagtttctcctaagagttagacaatatgatgtcttttaaaactgtgcttaactcttatagttccctttttaaatcatttttccctaagagtaaataaaataaagaggtttacttataatcaggaacttaaaagacatgttttacattatttttgcaactaactgtctataacacagcaaaggtgctgttattggaaagtccattttgacgttagttgactagcatgtgttaacttttttgaccaaataaaatagattttcccttttggatttccaagctacagagtcttttttcaaatcaggaccactagtttactcactgcagcttgcaaacatgccacttcttgggagtgtacatcttcaaatagatctacagcaacccatttaaattatattcaaagaaaaacgataacaccatctagcctgatgatttaaccacatccgtgtagtctctattttagagccagccttgtcgttttcacaggaaatgagaaatttctgttgaagtacaggtgtcagatattaattattcaccagacaaataagtggtactcaataaatawwtacaaaaaattctgtatattgccacttttgatgctagttgttaacttttgtgaaaaatcattaagtgcttgacataaacacttttccagtttctataatgcataagccctagggttgcttatttaaaatataattatcttcttatataacctggactttgttaagataaactgttatggtgtgtcagtggtatttctatcaatttttgtgatttcatttgtagagcatttgtataggattttctgtacaaattctactggttttgaacctgatattcagaatatttggggaaaaagatcataacattattttttcaactagctggtggacatatttcttgtttataaaattagagcagagtttttcaatcacttggttttctaattagaacaaatattaaactggaaaatatttagagcaaatcaaaataaagacaacaaaagaaaagatatgagttactttcctcccttctttgctaatcatgcttatgccttctgagttagagaattactcttttgatggagtcaagggatgaggttatattctgctctcactaataaaatttaccaattgtgatgagcttaaaaaataagagcactagaggaaaaatgtttccatcatatcttaaatgttataataatgacattgtttttattactttgaaaatacaagcttgcactaagagcactttagtaaataatatccaatttccaaactaggtgtagcgttttctcaaattgctttttgctggtattatgttgtatatcccctattatgttggatacccctagaatcaaacaattccagacttttgtaggccaggttcatagtttgagtcaaacacaaccccctgctttgaatatcaggtaataacttgaccacatactaggaaaacttgtactggtaaagcatgcatattaagcattagattttgttgattcgtgtttctccagagctcagatattaaagccatatatatatatgtttttttttttttccttaaaatctactagggtcccggactcttcccttcttgttagttccaggtgtaaataacctcatccagtgatttcttctgctcactgttcttaacccttggaactctcctctaattactctgacctatcctttcctcctctcaatttaatggcagctacccttaagtcattttaatctatggacttatatgggaaggcaatatcccttttgctgcctggatggctccaatttatagtggtatctcttgctgattggggttacaggaacatttaaaaggtcccaatcaatagactctcacacagtttagattacaggcactgccagatatgtattccctttcatctcagcatgcaagttagttggctattttatgcctgacttcacctcttctagtgccttactaaaaggagaaactaacataaacgaacatacagacacattttaaacaattattcaagaacaacatatttattagatgcatggcacaacttccaaattattgaagacagcaactgtatcaggtgcttctctatatcatgccaaggatcatcagttttccagccagctatatatatatattataatcattttccatcatctacctacttagcatatgcatatatttacgttcatgtagcctctcaatctgttatcaatttatatattaggtatgggctaggctaagtattgaccaaaaaagtaaccttaaaatttagtggccaaacaagtaggaaatttctttatttctcacttaaactcacatgatccactcatatactatttaattaagaaaactaacttgcatgacccaactgagctctacttgggttttgagacttgcaaatattctagctgagcatccatgtgcccaagtaaaacttagaaggttcaaatattagaaggaagaagagaaaaaaggaaactaaggaacaattagctacctctgccacacagagtccaatgttctatctattcattttgtctttgatgtatccatcttacttccaggactcttgatcttagagaaaaagttgcatatacatctattgctatagttttaattcttctttagataattataatatacatatcatatgtataaatgtatataagtttgagaagttcattccttttaatagcattaactatgatacaatcaaaaacaatctcaaattatttctctccaccttaactagatgatattaaacaacacttatgactatcaaaatacgctgaagctagcagaataactattcaaagtcaagtcatggccactgtgttttacttaataaaccaatttttctatatattttgataattggagtgctttttataactccacaaatagatgtttatactatatctatgtatacagtcattaagaatctgtgcaaatgatttttaaaattttgtttcttatagaatcgacttaattcattggtttaatcaccacctaagattcatagcttaccaatttggtaatctaagattaatagtttgccaatttgtattttgtcttaagttactttgtaaatgacaccatcagttcttggatatgcygatggtaatgtaaaactttgcttgtatttcaaatacaggaagaacatacttcgtttcttagatgcagaacgagatgtgtcagtggtcaagagcagttttaagcctggtgatgtcatacactatgtgcttgacaggcgccggacactaaacatttctcatgatctacatagcctcctacctgaagtttcaccaatgaagaatcgcaggtttaagacctgtgcagttgttggaaattctggcattctgttagacagtgaatgtggaaaggagattgacagtcacaattttgtaataaggtgagctttcttctgctttttgagattgtaagtttttcaaagatattttacttgggggtggaaaactgttagaaaattttaaagtattactaaaacctcaaacaaatatttgtctatgatatccttttctgtgcaacatttaaattacatttaccctggaatagaatattataattattgcgtagttgaaagaaaaagtgatcctgtcatagcaacaagattcacacagctttttttggtgaggtgaggggggaggcaaatggcaattttattaaatttaatattccacacaaacttttttcttagtatctcttcttcatactcattagttttgtgtgattttatttgttgtataaagattatgaatattactatggaatgatgtaatagatttatgttaatgttactttttattaataattatctaggagatagtaagaacatagtttagcaagtttatatttgatatcctgagccatatttctttaatttctctttatatgtggtatttgtgtatgttagtatatttgaattttatgtttttttaacataattaagcgtgcatgtttgtttttcattaacggttaaaagatatttgatgaattgtgtgtttgattaacctattaactgaaaaaaactcaacagtagaaatggaattataatcacatcataaatataagcagtttttaatgatcaatttttatatctgtacagtttttttggattgttttagttccttagaaaaattagctaaatgacagaaacatggatattgaaatatgaaatagtacaatataaagatagatagaaaagtatgctgagttgacatgttgaaaaacacagtctcttgaagatatrctggaatacattatttttgaatattttgaatattttttgaatatttttaaataaagtcttaaaagcataaataggtaactacttttaaaaaaaaagtcatgagaaatcacactcaagcattatcaagtgaagaaaattcatartagcaaataaaactgcaaacattttaccttattatctttccttttctctcttgggtgaagggtcagagattaatgtgaaatcaatttagctttttaaaacttgaactgttaaactaattagactataagagaaaccttgtgwacaagtagatacaaacaaagacaattgtatagaaagaagatgtaaaaaatttgatgagggaatggcaatggaagtggaaatcaggagcttcaaatgtcgaagtctatgcgaagtatagctgtgaaaaaatgtaaggcctctagaatttctgatgtgactaaatcataagtcaggtaaaacaaagaagtaacgatgtcaaggcataatcaaaattgttgcaatgtaaggatttcaacaatcgcaatagggaattttaaaaggtgataatactggaggaaaatagagtctaaatgacttcttatttctgtgtccctctaaactttgacactgggggccaagttgttagatttagccccacctgtgactctgaaatgaagactgcttttacatgtgggtaatgagagaggcctgatggcagtagtcctcaaagtttgtatcatttccttattgcttcctgatctggctttgttactccagtttctattgactgggattttgcattatttcaattcctaaactactgagttcttatctcacatggaattgtgtgtccaataagtaggttcctacactctttctctgtcttaagagtggctggtggccaaccttgcttcatattaccacctctcactttcacttttcctgccttcaatttctagaagttatatagcctgcatatatctcacttccctgcaattggctatggcaagcctataggtttccagatttctgggatgtagtcaacctgtgaataaaattctgatcccaaaaaatctttctgtccacctctcttattctaaaattgaagcctattttctctttcactggccaagcagcaactggccacttgatggtattgccttcacagctctactatggactactgggcatttagaccactactaagctactctggtgctactccagcaaaatgcctagaagttgatattgtacatataytttctcttccttttatgttttaggcacctaatttcatgcctactttttagatttaaaaccctataatctgccgtatattaatgcactccaatttcaatttggaatattgatcattcctgtagtaacccaactccagtgatgttcagtaaactggtttaactgtttttactccatattttgtggctcctagattctttatctaccttattgctaactatcagatggatttgaatgtctattcttagtttcttgtccactattgtcaatcaacagatctaattttttagcagaatagccttagcacttccttaagtggtgtattagtccattttcatgctgctgataagggcgtacctgagactggaaagaaaaagaggtttaattggacttacagttccacatggctggaaggtttcagaattatggcgggaggtgaaaagcccttcttacatggcagcagctagagaaaatgagggagatgcaaaagcagaaacccctgataaaaccatcagatctcgtaagacttattcactaccacgagaacagtataggggaaactgctcccatgattcaaattatctcccactggtccctcccacaacacatgggaattataagagtacaatttgagacgagatttaggtgaggacacagccaaaccatatcattccaccctggcccctccaaatatcatgtcctcacatttcaaaaccagtcatgccttcccaacagtcccccaaagtcttgactcatttcagaattaacccaaaagtccacagttcaaagttccgtctgagacaaggcaagtcccttccgcctatgagcctgtaaaatcaaaagcaagctagttactgcttagatacaatgggagtacagttattgggtaaatacagccgttccaaatgggagaaattggccaaaacaaaaaggttacagggcctgtgctagtctaaaatccagtgaggcagtcaaattttaaagctccaaaatgatctcctttgatgccaggtctcacgtgtaggtcacgctgatgcaagaggtgggttcccatggtcttgggcagctccgcctctgtggctttgcaggatacagtcttccatccagtttctttcacgcactagcattgagtgcggcttttccaggcaaacggtgcaagctgtctgtgcatctaccattctggggtctgaaggatggtggccctcttctcacagctccgctaggcggtgccctagtagggattgtgggaggggtggggggctccaacctcacatttcccttccacactgcccttgcagaggttatccgtgagcaycccgcccctgcagcgaacttctgcctaggcatccaggcatttccatacatcttcagaagtctaggcagaggttcccaaaccccatttcttgagttctgtgcactcacaggctcaacaccttatgggagctgcaaaggcttcgggcttacaccctctgaagccacagcctgagttctacattggcccctttcagccatggctggagcagctgggatgcagtgcaccaagtccctaggctgcacacagggatcctgggcccagcccgtgaaaccattttctcctaggtctccaggtctgtgatgggagaggctgccataaagacctctgacatgccttggagacattttccccattgtcttagggattaacattctgctccttgttacttatgaaaaattctgcagccagcttgaatttctccccagaaaataggtttttattttctatcacattgtcaggctgcaaattttccaaacttttattttattcagtttctcttctaaaactgagtgcctttaacagcacccaagtcacctcttgaatgctttactgcttagaaatttcttctgccagatgccctaaatcatctctctcaagttcaaagttccaccaatctctagggcaggggcaaaatgccactagtctttttgctaaaacataaaaagagtcacctttgctccagttcccaacaagttcctcatctccatctgagaccacctcagcctgaaccttattatccatattgcgatcaggcttttggtcaatgccattcaacaagtctctaggaagttccaaactttcccacattttcctgtcttgttctgagccctccaaactgttgcaacctctgcctgttacacggttccaaagtcgctttcacatttttgagtatcttttcagcaacaccccactctacgggtactaatttactgtattagtttgtattcagctgctgataaagacatgcctgagactgggaagaaaaagaggtttaattggacttacaattccacatggctggagaggcctcagaattatggtgggaggcgaaaggcccttcttacatggcggtggcaagagaaactggggaagatgcaaaagcggaaaccctagataaaaccatcagatctcatgagacttattcactaccctgagaacactatgggtgaaaccacccccatgattcaaattctctaccaccagggccctccaacaatatgtgggaattatgggaatacaatgcaagatgagatttgggtggggacccagctaaactatatcaagtgagaacctcattgagtcaacagttgtattttgaccttatactttttctgtgtgcaatgtgtgctttactttcttttagatttcatgagtattctataatatatatatatttacatccaaactttaaaagataaaattccttgcctagataactagtaatattaagtagtgtgaaaaaaatacttttaaaactttgagaataatgttgacatagttaacaaactagaattttctctcattggtatttcccaggcgctttctcttctcagagaacggatgacctcagatgaactaaaatgagagttattatataagaatatatgccacacaaaatactaactttctcaattcaaaatagacttatctctatactttgtaatacaagagttctttgacaattcaaacagagtttataaacttaaaaacaagataggcttgctggagttttaatttatatttttgactttggaacatcaccgtggatttttcaaacacatttctgtaaatctacaacctacttcagtctacctcccactgttggtgaatttcctacatgagtcttacctgcatacaaaatcagaaattttagagtggagaaagaatctgcatctttgaaaagcacatatatggggagttgacacttaattcactataatgtagaaatttagtgaatgtagatatatgtgttttatgtatatctaactcagataactatgtcttagagtgtcagattcatatacacacccacaggcacatacaaatatcttatttaattattttatggtaaatatgaatgagaaaaattgaaattgccataaaagtgccttgacccctttttcttcttagcattatatcaccaattaatcagcaaattctatagatattaccttcaaaaaatatcaggagtcaaatgatttctcatgacatccactgctgtcaccctggtaaaagccaacatcatctcttgattagaactctacaatagttccttaactgatgtgacgggttgcattcttgctccctgttcccaaagccaaagtctctcttcatcataaagcagcttcttaccacactctataaaatactaatatcttgccagtaacaataaatgaggtaatctgaagcttcagggacagacgatgtgcctgccagtcattttccctgaaaccctcttacccacatacctatgggtggttttaccccttatttgggggaaaggatgagggtctatgcttgtacagaatatcctctgcaagtcttctctgactgtaatatcagaaacaccccctaccactgtcaccatctgtcactatctctttacccttccatttatgtatttatttttgcattgtatgtttatttatttattgtttatctttacaactagaatatgcaaggcaagctttgcctgcatttatcccttttttaatctcagaccctagtaaagagtctgacatatttatatattctataaatatttgctagaggtaagcaagaaggcatgtagtaagaaagaaaagaagaaagggagggaaagaggaaggaagtaaaggagagagggagggagaggagggagaaaagtgttctatcatggtcttccgtcatccatcccaccttgcatgaatgataatcccttatacaaacttcaatattaccataataatgtacttggttgtctgggatgagtggctgtcacatcatctcctccaaaactacagctcatctagtcatcatctcctctaaaaccttaggtgaccaagtttcagagcaggatgcaaattcttcctacagtaaatgcagaagctgtcttactctgtctttcatggagaaacatatatttggcatctgttgtttgccttttagcccaccatctcaccaagcaaaacatgaggatctctgctttgcgtgcctctttgttttctcgtattaacatatttttaaacttacagtatatagtctataattccaaatttatagaatgtatcttatgaaacaatttgcatgaagttgaatttacataaactcagtgtcttacaacctagagaaatgttgtaaggtagaggctactttacatgtgcacatctgaaatcttttgataactagattttttttctaaactatcgtcatctctattatattattcctttaaagacacaacatctctattatttctttagaggtaaaacattcctttatattatatttaaagatgataaaattaaaagcaaatatattgggctctacaaattcaaatttttatgagcttaactttcaagaacaatttctaaacctttctctataaatttgcaatgtagaaatgagttgaatagccacagaatttactgatttgtgcttgaaaatttgtaaatggcagagtacacttaggactaggagtttaggagtctcttgatattttagcagctgtgattgtttaaaaagattacttaataagaactaaatagtgaccaattgaagttcataatgtattctggacttaccaagaagtatagaaaggtaaagataagcatcttagtgaaggcacaaaaattatcaccatgatcatttttgatttgttctatatttttactactttccaaaaatagaagttagaatgttgtagattaaattatttgctagggctctactgtctttcatgcggtacgggattatagatttggcatctgttgtttgcattttgtctcaccctctcaccaagcgaaacatgtggtactgcctaccacataatataatctacaacattctacaacaaaatttctgatttaccacaaaaaatcagattttctaatgaacactttagaaagtatctacattttagaaacaatatctacagaaaaaccatcttttgttacttaatagctagttgagaaattcattcctttgagtttaattttatcattttattatgaaattgtacgtgatcacttactgtattctacagtgtttaattgtggagatacttgaaaacttttctcagtacctatgagctgaaaaatatactcttttattgtaggaagcaataagcaaaacactgatagttggttattattaagtagttgatggttgtatcaaggttcaattagcacttaagagtcatcattacaaacaaaaaaatgagcaaaagtaatgcctgggaataaaaactttgcagcccagcacagtggctcatgcttgtaatcccagcactttgataggctgaggcagttggatcacctgaggtcgggagttcgagaccagcctgaccaacatggagaaaccccatctctactgaaaatacaaaattagccaggcctggtggtgcatgcctgtaatcctagctactcaggaagctgaggcaggagaatctcttgaacctgggaggccgaggttgcagtgatcagagatcgctccattgcactccagcctaggcaacaagaacgaaactccattaaaaaaaaaaatctttgtcacttctgaataaagactgtcacttcttgtgaagaggcatgtgacctcattcttctcatttgattaattaggccactcctaagaatatatccttcaaaccatcaagccgaaaaatgaggtgctatgtctggcaatattaatgatgaaccaaactctcccagtgcctaaactccctataagttagatccttttcaaaggttaattaatagccatttgaatttctgaaatcaaatcattatttgaggggtagtaaagacggaggagtaaaacagaatccaatgccaacccattttcccaaagacaaaagttaatttcagctcacaaayaccaatttgtaattgataggtggagagtgtgaccataatttaaatatagagtatatgaaacaaaaatcaaagacaattttgataataattttaataatagaagctctccataatcacgtgtaagtgttcaaccaatagactttggattatttcttctggtactaygttttcccttaggatgatatctattttctgttttgagggtcatattgtgctacctcttaacattcttagatttgtaacaacccttgaaaatacaaaattctaatctgaattatgaacataaaccagtcacttcattgtggacacgagatcttcaatgacctattgtcataccagactttctttcttccttacaactcttgttcttcttgttgccttctgactcattatttgtgtaacaaacacatttccttcctcaagtgtatgcgtagccctttgttattgccaatgtgtctcctctactttagaaggtccagagaatttttgcttcaaatttaatcaatcctcattattctttcttgaaatagtttcctagccacattgaactggttaaaattattacaaaatttcagtaataatttttagaatccctagaattttttattatcctggagatgtgtatatatctgcatagctgtagatatgattgatttgttggatggttggttttacagtctgtgtttccacttttttgtttctcacttttcatttaacacagtaaatttgttgagagagagagggagagataaattatacctggtttacttgcagtgggcactaattagtacagtaactccttaaggataagatttacccaagtattatactcaagttgacctctaactttataaaccaaggtactctcttagtggctgtttgtatcattcattaatcaattacgttaaataatgcttttaatggggtatttcaaaaaatgagagtcctggtcaatatcattacatgatgcttaaagttaaaaaaagaaacagaaaaaaataggaaaataaattaaagctcaattttcatttcctaccgagtgactcaatatcaaactgatttctaaaatttaggtctcatgtacatatatccctaaataacagaaaaataatcataagagtaaaattcttatttcttaacaaaaatgtctaaaactctaatttaagtaagaattttaaatacactgtgatcaatgtttttatatgtggaactctaaaaatgcctagtatttttacgagattccttaaatagcaaataycatgtttcaaagaaagaagattggctaagatagaaaaacaaaggaagccagtcattggctaggttaaagatatcttacttcttgtccggcagtaccctctgataagaaaggtttataaaaaaagataatgtccttgtaatactaagattttgtcatatgattacagacaagcaaaattttgacaaatttggttaggcattgatgtgccatttatgtaccatttctcacctgcttgaggaaaaaaagcaaatgggagcataaaagaaaatattgttttggtattattccttagacgtatctcttcaaagattgataggaattctgaatactcttgatgaactaccttaaaactgcagaaaatgatgattttcccctatgagattctgtatgaaagaatgttcagttacatatataattcgatctctcatattctctttttcatctctgggataatttcttttatccttcagataacatctgtatttctggtattattaaatacagaggagtatagttttaggctttatgtctttgttttattaactaataaaagagaaattccaaatattcagttgactaatgctacacttctaacatcaatagtaatattgtgtgcagaagaaggtataatatatgtgattttaaaattgtaaaacactaaaacactacttgataccactacttttaacattagtaaatttgggaacctctagaactagttccctaaaatttgtctcaacaagagtccacattaatgaaaattctatcaactgaaatacattggttttatatttttcttgtaaacatttaaagagaaaattagctgttaaaagataaacgtcaagtttattttatcaaaaacactaacacttgttacattattttatttatacaataaactttcaagaggaccaaccaagagccagtcatgaacagtgcccaattacagaaatgaacatctacattcattcttaaaggacaacctgtgctgtgtggggtgaggaataatcactacaattcagagtctccaaagacacataccacatttaaaatatttgtctacggccaggtttattatttccaataatgcagagggactaatagaatgtttgaaagagaaattaaggtatgcttccaatgctgaatgaggtgttcccactcagaactttatctgaagtctttgagatatgtcaggataactaattaggttactaatctttagatatcacacataataaattttaagaagatatcattggtcacgttaaagttttatttaagtgccataagctatcagcattctrctctacaccaaccagaacactgccaacatctacacaccttatataattaactattaacagattcagtcaccatcataaggggctgaaaaatattcaactgactaaaaccctggtggtctctacctacctgtactgtagaatactttgacccacttttagactttacatacagttcaggggattgtctagtacatatctgagctgaatttaacttacataacacttctttaatgccacataaaatggaataatgatagaatctttattaagttaaataaaagctagtaagcattagaaaaattgtccaattgatattattttttaaattttgcacttggattgtttgatgtgctaaayatcatgtaaacatagagatagatagatgataaacagagatgacagatagaagctgagcacagtggctcatacctgttatcccagcactttgtcaggcctaggtgggaagattgcttgattccaggagtttgagaccagcctgggcaacatgataaaactccttctctaaaaaaattaaaaaattagacaggtttagtgatgtgtgcctgtagtcccagctactcaggagactgaggtgagaggatcacttgaccccgggaggttgaggctgcagtgagccatgatggtatcactagactcgagcctgcataaaagagcaagaacaagagcaagaccctgtctcaaaaaaaggaagaaaaaagagatgacaggcagagaaatatagagaggggagaggggaaaaggagagggagagagaggaaaaggcacagagagaggacataaaaatatgaatcaaattgatgctgtgctgcactgaaaagcatcacttcagatatagtccaagagtccaatcagagtttattgtaggtgatattggatgaagtttttagcttttctatatttagttttctaatttacaaactgagattaatatatgtactctttctgtctacctggagttttacaacttacctattatagagaccacagagtgatagaattgctcctacaaaatccttgcctcaagtgtacccccaccatgtatgcttatttgtcaaaaagtgtgttgtaaaatttcaagaattgagagtttgaaagattgcatatatcatttatatatcaccataggtaaaggaaaacaggtttagaaagattccctcatacaatctgtataaagtgtctttcaaaacctttcttaggttctttctctttgagtacttttgaaattaatgtaatagtgtatatattacattaaggaatttaatttgttggttgtgaaaattgttttgaattttgcaaagcaatgcttaaagtgcttttacattttttctgtagttatctttcaagtttttacataatctactctcataagtatctacataaaagcatattctaatatttgtactagctatactcaataatttcacaacagtggttttcaataaaaaatattcatatatttcctaatagtgattttgagtgatggcagagagcaaagtctcattccatcgctcctagtctcctcttccccacctttgttggaaaagtggtggtaaattctttcctttctctgggatggctggagattgtagaaactctcaagcagcacttaagtactggttcctcatagaaaagaaaccttgtttccccttggtaacaagaaaatctggccctgcactgtctttggtgttatatggtggactctgagggaggcaatgattaacaattacaattggcacctaatattctttaaccatcaaataccactccttactttgtttaaacaaagctactagagatagtgagtcttctagagatagtgagtcagaaatcaactaagagctacataacatttttttttgtcacttttggctaattagttggaatttctaacttaagtttgtttatttacttatttctttctacttacctttcctccattctatcttctcctcatcttccctctagcttaaatcactatcttctatttactcctttttaatttcttaaccaacatcttcattccctgccctgcagctttttctctccttgactactttcctcctaatttcctcttggtgcatatgtttttccttataaatcaaaaacagcaataagatatcaattaagagggccacttaaatgtgtacttatttatgtaagtaaatccttgctactcaaagtgtggtcttggatgaccagcattatcacctggaagcttgttagaactacagaatgtcagaacttgcacctggtctgctgagtcagaatgttcatttgattacagtgtccaggtgattcttatgtgcattaaggcttgagatgtgctggcctagacaatatgccctaggcacgctggagctcccactatgtttgattttttttttttttttttttagcccatatctttaggacctagcaccaagattggtacactgaggttggtcaataggtacaaaattacagttagacagtttagtcaattctcacattgctaataaataaatatccaagactgggtaatttataaagaaaagaggcttgactcacaattccatatggctgggtaggcctcaggaaacttacaataatggtggaaagcacctcttcacagggtggcaggaaagagaatgagtgcccagcaaaggggaagccccttatgaaaccatcagctctcttgagaagtcactcactatcacaagaacaggacggaggaaactccctccatgaatcaattatctctatctggtccctctcatgatacttgagggttatgagaactacaattcaagatgagatttgggttgggacacagctaaatcctatcagacaaaaaggataaattctggtgtctatgacacaataggctgactatagaaagttacaatgtattgtatatttcaagatacatacaagaaaaaaattttcaatgttatcaccagaaagaaatgaaaaaaatgttaaagtgatgaatatggtaattaccttgatttgatcattatataatctatacgtgctgtaccccataaatatataggattattatgtgtcaattataaacacaaaataataaagagtgaataagattttttaaaaagaatataacttccaagaaaaacctgatacattgaggtatatataatttatttattgaatggataaattaatgagaaaattaatgtaggagttgagaaaattttggtttgtattcacgtatctgctgtcagaatttttaaaacactgaatttcaaaattagtacataagaggagtcatatataaagagaatttaaacctttacaagaaaatacagaactaagaagagtgatacagtgaaatgttctaaagattagggatcagaaaatctgggttcctattaattactataaatgtaatattagacaaccatcactattttcactgttcagtgaggtcaataataataggcctattaacagcagagtgattttctcatttatcagatgagaacatagtaaagaaaagcacaaactgtaaaacaaaactcataatgagtgatgctaaaggacatcttgtttgagttcatcgtcataggtaaaacttaaaattggcactgcattttctaacagccatggctaaaaggaaagcctgttgactagagacacaaattattattgtctgatatgaataagaagatgaactttccccaaatttatcaaacatatgtaaagttgacactaaataactggataaaactgacactgaataatatgttacacaatgtgatataaaaaacaaagcaatatcactcagataggagtgtctacaaaatctgagtatgtaaaattagatataaatgtagtgaagatatatatgtcttcagaaaactaaggtaatatggtaaagatatattatttaatgataatctatattcctaaaagtagggatgatatttttcccaaagaaaaaggatggaggaattgactggctggtacaatgcattttataattcaatcgattttttattctccactggtagataatttacagaaagctttaaatcaccttcttgacctccttgaatgctaactcttttatgacaaaatagacttttctggaacagaaaaaaaatatcttatttttctacatgttcacaatgaatggccttaagactttatccttctactctcacagaggatatgtattcccttaactcaaacagcaaatagcaaacagctaagttcatgatagacagccaagtctagggcactagaatgatgtttttaaaattactactaaaacgaataaccacttatagtttaggaatagtaacattgcttatctaatatttgctacacacattttctccagtaattttgcttaataccttattcatgattttgatctatgaaattttataatttgtataaaactaattaaattgtgatttttgtttattgattttaaatgcaaaatttatgttatatgtagaaatatgatttatatgttgttctaattatgatgtttaaaatttaacttaaaactacacatgaaatatgaaatataagttgtgatgagaggtacagctctttatttctaattatgtcactcctcacacagaaattattttatctacaagtaaaaattttaaaaaatggaaatgatgacaatatctaaaattttaaatgttttaaatgttttcacccattttctgaaacaaagattgtaaacgatttttcatatatcagtctaacaaagatttttaaaatgtttactagtcagtaaaaagttacattgatgttggcactctcgtaaaatgcatttggaaatgtaaactgataacagcttttccaaaaatcaagttaatgatgtcttccaaagccttacaaattaaattaaatcactgtacatctgaatgattattcaacatgtgacgaagaggaatctgaagcaatgggaccagtaagcacacagacaaatactttccatgatcttaagataagactattcacaatagcaaagacttggaaccaacccaaatgttcatcaatgatagactggattaagaaaatgtggcatatatacaccacgcaatactatgcagccataaaaaaggatgagttcctgtcctttgtagggacatggatgaagctggaaaccatcattctgagtaaactatcgcaaggacagaaaaccaaactccgcatgttctcactcatacgtgggaattgaacaatgagatcacttggacacagggtggggaacatcacacaccagggcctgtcgtggggtgggggaggtgggagagatagcattaggagatatacctaatgtaaatgatgagttaatgggtgcagcacaccaacatggcacatgtatacatatgtaacaaacctgcacgttgtgcacatgtaccctagaacttaaagtataataataacaaaaaagataagacagaatttgagaccaccctattgttaggttcgtaataaagaacattcaaggggaaaagccaagatatgctgaatttaaatgatgaaggatcatgacatcatgttaagaatttgcatggaatcttatagtccaagaaggacccttggagtttgttagcatgttggtctgctttttgtttgtttgtttgagttttgttgttattgttataaacagaagagaaacatactgagaagtacagaaacatgagcatattcacacttggaaagaccataataataaacagataaataaaatatatgaaagagaaggcaccctaagtgaggaagatattagaggaggaaaaaagtgatgacattcagatcatagcagaaagtaagatgataacacctagtgtcgatggtatgattcatattaatgtgaaatgttatcattgttatctgtctttgacatgaaatggacattagcaaatggtcggtagatctatccttctatagatttccaaaatatggctagagtttttgatttaaagtacttgttatttttcaactatcatacttatctgtaaataagacataggttaaaaatgtactccaaagccaaacacaaatacacttgtcagtgcctattgtttcaagttatatgtaattataactttcatctttcttataattgttcttcacttcttcattcagtgctttatcagaaagttcagatacaaatataaagagcaagtttcgacttttgaggtgatcacactctaatgaaggaaataaattgatacactaacggtgtccaaattgctttattaaaggtactcacagaactaggcactgataatgaggcaaaaggaggacataagctctcattattattatgtgtagctttactaacttattaaagatgtcaatccctatacaagtaacaaaatatgccagagtttaatatatagtagaatacagataagagtaagtacttttacaccagagcagtggaaacaattttgcctgggaaattatgtaaagcattgaaatggatattaatcrttgatttttaagaacaaatatgactttttcaggtttagggctagggtgtctgaggaaaagaggcagtttcaggtagagacatcagcataaataaaggaatacagataaacaaagacataggtagtctgataatatttgaatctaagatatgcaataggatgtataaaacaaaaattctgggtaggggagggaatagttatgaaagacccaattaggaatcttgactgaaacyactgaagatgtttggttaggttcataacatgattaaacgtacattttaaacaacaaaacaccatctctgaaacagagaattgataaagttgacagtccctgtggcaagcaactggttagagcagtgtcttttaatatcttttcacaaagatgattagtaatagaatagattttatatcatggtttactccttgtattatttccctggctactacacatgcacacaaatatggaagtcttcaacaaattttcttaaaattatgttcaaggaacactgtcattttctgttataatccgctctatccttttttattctttcaaaattggttatcaatgagcacacaattaattcatgatctaccaatgagtctagttaattgtttgaaaaataataaggacattattacaatactagttcaaagaaacatggtggtacctcagctgagaatgtatcaataagaacatacaagaggaaatatattcaggggaaattctgagaggaatttttagggctttgtaatgaatcagatacagaggataagaacattatggggatcaggcattacagctaggtcaaagtatgaatctgttaaaatagagcttgagaatgatccccttagaataagtatggtgtaataaatgtgaaattgccttggcctaccttatgatatcagaaattgaaactcatttttgtacactcatgatatttttcccaatgcttgattggtattagaatgcctacatcttttgagcatcaaaccaactgtctttctgggactcagtattgaataaataatatatactaagttaaaaatcattttcaaccttgggttatactttcaaaaaggtatttctaagaatgacaagtgaatatggtattaagtttttttgtttatttaagcaagaaagttaaatgtcaaagcgacatttctgtggcaatttgatggtataatcactaagagttagatatttttcctacaacccctctaatgtacccattgtacataccttattaacagcataaattgcaaagggaacaattatagtttttctaccttagttttctatcatgggtgattacagtatcagccataataaatgttgtttcgttctttttagtgcacaacataatttttaaggacttaagtactatgctgaatcagttctttcttctgttaaacagtagtaactgctcagcaaccacagaccaatggagtagtcagtttccctgatgattttggcaagaatgtgtcaggatacatacatcttgagaattctcacttggttctccaatctctaattttaaatatcccaattacaaacttgtactcaaagttttatttcgcaatacacagggcatttttcaacaactcatattttttccctgcattcctcaggcaaataaaaattacacttctttttaattacaaaggcagaattttgagggtatacctagtatcgattctatgtgcaattttaagaaacatatttatgattcaaatatctattagttgactaccataaatatatccacattcacttttgtgaaaaaaggaaaacaatcacatgctaattcttaatggtctgtgataaatggtgaaattaatatgtcatatttaaattatcttgacaattcatgtagtgtaacagcaagttcctaacaatgctcatgaagtttaatgacgtatttttcacatctatgtgtatgtttatttagcccaggtattaaaaaaaagtttgagtgtagaatcagatgtagactgcttggttttgaaccccagctctagcacttacaaatcaatgaccttgggctggtcacccatcctctgtgtttgtgcttcagtttactcatctgtaaagtacatatgattgtagtactacttcattgtgttgttatgaggcttaaatgttaagtttatgtatatgtgtgtgtaaacatatatataatatgtatttgtgtgtgtgtgtgtgtgtgtgtgtgtgtgtgtkaaatttagaagaggtcctggcattcttgaagtcctttacaagtgttaaaataaacaaagatgtctttgtaacatttcattgaagtaaatttttcacatagtcattatttttacttatacaaacatcttttagtttactctttgaaagaaaatatgtgtgttatatgtgaaggaaaaatgtgatcattaaattaaacaattaatcaagatatagcacttttaacttcaaatatttccattcattttggcaaatattttacatatcttatttctcctatattttgggctttgactgataggccctggaaacataaagagaaaatagatatgtttaaggaatccatagtctggtagaagaaactaacataactatgtaattaatccacagtgtgataaattcattgagagacagacactatgttaacattgtgtcaatgaatacaagacagcacttagtaaaaccagtgttaaaatgacataatctaaggtttggttcttaattctgaaggcactgagaattactattggccaggcccatgtgtcctcaagcttaaggggcaagcttatgctttctaaagcagactgacattccagaacactacattttaaatttcattcacaggaagtctcatcaaacagaattctcataattagtaaatgtgcatggatgattggaggagtatgagactaaagattgtaagaccatttaaattataaaaaaaatctaagcaaggcgtaactaaaattggacagtggcaagaagagtaaataggaagggtcacattttggtggtaaaaggagtatatatgaggcagaatttgatgaccaagaagatatggggaatacaatagggagtgtgagaagtctctgagatgcttgtattttggtgacactagaagtaatagtgacatagtattagaaaataaagaaaaaaacaagaagtttatggaagagaaaagagaacactacaggtaatggttttcaatttgaacatgctgatttgaaatatcattgggatagtcactgaggagttcagtaactgattgaaactcaggtaggagttagagttgaagataaagatttccttaaccatgctaactgaagagttagagtagttgatctcctgcaagaagtgaggtgtgaattgagagagaatatgtctagtaacaaaaatctagaaaatgccaacaaggaaaaattaataatacggagtgatcaattggactatttttttgcctttttaaaaaactattcagtatctgacaatttcttgttatttaaggctaatctttaaaaatgtagaaaggggccctgttgtccactacagaagcaaaaattgatcaatattttcatttctctctgcctagcagcaargggacagaaatgtggtcaaaactagtttaaccacattttcctaattatgactttggctagtgaaatatggggtaagaaaactgggtaaactggaagttcagagttccctgatagtgagaaatgctgaggtatccctgacagggacataaccattgttcggggactatgatttttttagtgatttctgtggtccagccagctttccaataaatcactttttctaagttaagccagagtcggtttctgggagttaggtatggacaagwtaagaacagaaacaaaggaaatagacttcactgaaatttaagaaacactatgcaaatgtcacaagtagtcaaattaaataataaacattataataattggttgttttgtgggatacaattttgaaaatatagtattcagttatgtgtatgttatgtctcactgatattgctatgtgctttgtactgaatttaataaatgagagaactttacaaaatgattaccggacacctactatgagatactttggcagtgggaataagtaatgaacgagacaagatacctccccgcattagtagaacctgaagtttgttgccatttcagaatttgctgttggctttttttttttttttttttttttttttttgagccggagtcttgctctgtcacccaggctggagtccagtggcgtaatctcggctcactgcaagctccaactcccaggttcacgccattctcctgcctcagcctcccaagtggctgggactgcaggcgcccgccaccacgcccagctaatttttttgtgtttttagtagaggcggggtttcaccatgttagccaggatagtctcgatctcctgacctcgtgatccagccacctcggcctcccaaagtgctgggattacaggcgtgagccaccgcacccggcccgcttttataaatatattgtgaagtcccagataaagaacagcagttaacgctttaccctccgtattacttattacaagcaactatacattgacaaccagatgctgttagaatttctttttaattgataaaagtatttacaaattgttgtctttatgatgtcttatcattttaatttattcattttttggttccttttacaatatgctctattttttatcctttcttgaaaaaacaagtgctaacttgtaattagtcataccattcaagtctccaaggagaaagctgataaatgtgaagttttagtttgatttaaaatgtggattcacaagtaagcactctgactaaaagcacctttcctgattttacagattcttttctgttgatatgctgaagtgaataaagacagtgtaagacagagccgtccttaccacttgtccgtagctgaagtcctgggataactctctaattttatgtcttattttaatccattgctttatatcagaaaagataattgtattttagattacatttaaataaattaaagatattaatagcattttagcgacctcataatattttgagataatgctttcagtatcctcttattatttatttcaagacttgagttccaatgctaaagaagatttttttatttcagcaataacatttgtttatgtgtagttgttcatactgggtacatttcttatatgatataaatcttttgaagagaaagaagataaaaatttacacatttcaatatatttattttaaaattaaactccatgagtggattttacttctcattttcacctagaacaactttttattttagggaagagaatatgggccactggttttattgtaaagagtcttgatttgaattcatgtgttctgaattttagtactgtacttttaaatggcatctcagaagtgggtcatttttcttctttcttccttgcttccttcttccctccctcctttagtgtgtgtgcatctactattaattacctaactttttcccacacttccatcrtaggaaatctcagaatcaaccttttattttccttcacattctttcctatgtctgttttctttggtggcttttcagaggagcacaaccttctgtatattcctacctgggagtgactttctgcatgctgggattatccacccaagaccctacctttggggaggaggatttacagaagactgagaaaagatgaaaccttcactttagccaatcagactttcagaccaaacatgaggttcaacaaggtgatagaagtcacagccatatcacttgcacatatgcaactgaacttttgaccaagttctttgtatttattttttgcttcctttccattcttagggattaagtggtacataatatttaagagcatgagcttaaaatctgcctctattacttaaaactatgtactcttggacaaatttcttgcaactcagtttccttatcattggaaaacagcaatagtgactgtctcattggcttattgtgagaatcacatatattacatgcaaagcacagagaatgctccctggcacataacaaatgttcaataaaaggtattcggccaggtgcggtggctcatgcctgtaatcccagctacttgggaggcagaggcgggtggatcacctgaagacaggagtttaagacgagcatgacaaacatagtgaaaccccgtctctactaaaaatacaaaaaaaaaatggctggggtggtggggggcgcctgtaatcccagctacttaggaggctgaggcaggagaatcagttgaacccaggaggcggagataggagkgagccgatatcccgccactgcactccagccagggcgacagtgtgagactccatctcaaaataaataaagaaataaagaaataaatattttaaaaatttaagtattcttcttagagcaacaataaaatatttttcttatcttctatgtgaattatgttattatgaaattgtaactgggaggccttattctcctgaacagttgagtcatattcctctttttaagtacaattgaccatgtctatgagttttaaagtttccacactgcctatggagtcaaatttgtttcatctaatatttaaaatatttgcaatctggccccatcagtcattcaagtctcaattcctaggggatcaaaagtaaatttcagccacaatggcttactaaatgtgttataaataaagtttgggcttccttacgctgttgctcagagatcttatttgacatgcctttaacttacctgcatgcatttcaaaagatttattatcataatagattgtaaaaggaaagagcatgtaaaaggaattagcataatctaatatgttttatccacccagggcaaggaattttgagaggcattccaaatattttgtttcatttaattttcccagtacagttcccatcagtgttagcctgatttatagaaaaatttgaatctctgaaatatttttatttgtcacttatacttcaataaaggaagaagtaaaaaaagagttataagcttggacaagttaagtaacttgattgatgtgaactccattgcccacatggttactgatgatcaaatagctaagaatagaaatgaagctaaatatcttttatttcttaaagtttaagccaaatttggataaatatgaggtatatatttaacatttttatttaaattaaacaatatatttttccttggcacgcttcccctttttctcccctccmaaatctaagctattctctagaatttgtgcagttatagcaaatttgaccgatgattccatttttcttttcacagaagtatcggaatgacacagtctaacatatttcttggtatgcagatctttgtttgctagaaggagtttgattatattttcattctgtgaatttctctagaaattatgacactgttcttcccacccttgccagtaatgttaacgaacctgggtttgtgaaaaatttcctcttctgtttagtcatttcattattttcatgatgtgtgttgtttgtatttctatcaagttgagaatttcaacaattggtattgttaaaagcataaaatgtggtgtgtgtgtgtgtgtatgtgtgtattttgtgtgcctattcatcatactgaacatgcaaatgtttaatgtgatatttcaactttatttcttatattttgtttactacattatggtataccacatgaaagtccattttaatcctatggttaatatttcaaaagtcttatcaattagttatttaatactttctagtatcattttgaaatcctgtctatcaagagatctgaggtatagatattatatttatgttttagatgtttaaaaccttttgtttaataactgctcaaaatttgggaaaggtcatggctgaatggccttgaataacatacctgagtcttaggaatctgagatgaaaagctagggataaatgatagaacactctttgttctataggaaggtttgtgtgcaggatgaatttatagacatttatcacatttctgaatgaactcatatgtataatagtgtcagttaaaactcctgtcctggaatgattccaaactagatggtgcttttcatttataacctatatgcccttggacatgtttctcaaccactttaaccttagtttctcatctaaaagtgaagttgatactactttttacctcaaagcaaaatgaatggtttcaggtctatgtggagcccacaaccttcatgacaggaaagtcaaagagactggcaggtcgcatgtgccaactttccacagaaattttgagaaagtaatcagaaagtctaagaaaagacagctaacagattttttttgttctatttgctcctcaagctgagaaacaagatgggagcaaacgggatcaataagcttcctttaggggcagaaaagagaagacattggttcctatttcacagtggattgacaaaggtgtttccgtaggtaataatgttttggctgagagatgtcagttagcacaggaagcaacacagtgggattggccaaaaaagaaaaaggatgataattatgtatttggaatttgtctgaatattaacaaaggtggggaaaatttggtctataatacacctagaattgttttcttcttatttaatctgttgggtgtgtgaaaggatgtaagtgacaacctccaattattacagaacaccatgttttacaccgtatttactccagttttggatgatgagttctatacctagcacagatacatacaatacgttgtagaattaaaaaatgtagaattaaaaaattggatagattatgtcattgttaaataacataaataactaaatagctagaaaaaaagtctgagcttctagagtagtgtttgcaaaacaaactctcaataaatgcctgttaataaatgcaagtgggatctcctagttgcatacattgttgaagtatcatttaactgcagagaataatggccaatccaagagagattttttgctagggaattctgtaatcttgaggtgctcacacatgaaataaacatttattccctatgaattctaaaataaatattttatataacttttaaattaacatgaaagtaccttcaattttgcatgtagggatgagaagccatcatatgcagtgtgaaatcatggaagaaaattcagaggcttagaatacagtggagttagctgcattcctgtaggtgtttaatcaatattggagaataaacacaaataaattgagaactgggaagtttagagtaaataaagagtattgttaatacagctaattctgtgtatatgttttcaacatgtcaaatataaaatgggcacaaatatttaaattggctaaagataatgttgtttgactctattaaatgtttatatgcactcaacaattttgactcaccaaagtccatcattttaaaactggctactcctctattttatgagattaagagtaatatgagtatcatgtattactcataaatgcttgagacacattctggctaattttgaatattataacctctaaggaattttttataaagaaaaatgaaaattgtgatggcaaatatattcataatcctgctcaatcagcagttttgctgctagtaatgtttggatgctcacaacaagtctactgaattgctggagtgcaacacagctcgttggttatttttgattttttaatgctttcttttaaataagtggcattcagctaattatatgactaaaaatctgactcaaccacagagttgttaatttaccagcaacatgtggacattgtattactctattttccagggaaaatgtatatatattcttccccaggaaaatgaacaagctggactcctaaaaccacaaagcgttgtattttatgaagtgtcttctrtcttgttatttcctgtacctcagttactatccttgacaaagtctgattgtgctctgctcagatcctcaagactctscatgtggatttgttactctttgatctccaattgctcctttagttagcaccatactcatttagcattcattaattaaatcaaatatgttggtttgtttcctaaattaatctgttctccataaatattcttattccattagcttctttttgctttcaaagtggaaagcatttatctttcagccttcrgctttaattgatgagcatcttaccaccttttgagaaattcatgaccagaaaatcaagagtgggtattggcaaatacggatagggggtgggatgtttaaagatgtggcaagaaaaagtatacagtaattgagtgatttttttcctgaagggataattcagcagaatatatcatttttattctatttaattgggttggtttttactagttttactattatagtgaaaataaagtacaaatattgttttctctacaattggaatcctctaaaaagaaattactgagggtttgttttagtggaaaaatatgtccaaagccacttccccaacaggaacatgttaactgtaatgttacatgtattctccctattttacctaaagaagtgtcagtaataatgatgtccagaatatacttttccccatagtatccaaattcatgtgataactagcttcattaggagtttagattacttttaatatttgtgtagagcacatcttaggamtttaaaatgatcaagtccttgatcttccttgagttccacaaraaggtgttcactttgacaagtattcgcatgcagcaaatctttttctgggtagtcctgtttgtaatattcttaccataatgagaatgaataatatctaataataattagtggtatgaatcatgagtagaaacaaatacatactctgtcatataatatagtggatgtaattaaagatacccaaattgaaaagataataatctttatactttctaaataatattattgtgttaatatttttccctcagtagctaaccctaaataacagagaatttgagatgaaatatatttgttgttgtagctaaatattgtcggagatctaggaagtaacaagatatattaattaagagagataaggaacgatatataagacagtatttttagtatcagaacacatactttactttttaattaaaatgtttaataattcaattaatgtgacaaaatacacaaggaagagaaatgtaaggaactttcataatgtagccaaacatgcaaaaatgcagaaaaagaaaatcccttcccttgaaaggctgataaaagtattaaaaatagtttcatattttcatgaagggtttgattgaatcgattcaaacaactttttcccaatacagtaaactcttgtttatcaaaatctaacttttcttttatcaactaaaacctacctttttaaaagcaagttaaaaatagtttttttaaaaaaaaaaatgaagctatttttaaaatcaggtataaaaaggtctatgtgaccgatcaaagaagcatcagaaattggttaaaggccaaattcaaggtgcttttcaaagctttcttctaatataagaatgttatattagattatataaatataaataacaggttatataaacaacatcaggcccaagctcttttcaaaaccttatggctctagtggagaaaacagtacggcatattctgttctttccctacatatgcattccccagggatgcatacgtccgaaaagggaaaacagatattttgaggatgtcctaaaataacaggaaggctgatatttgatcttatagtaagagcttttctatattacttaaaaccccagaaagtcatattaaatatgacatctccacttttcttatttttcttccccatttagacctatagaaagcaattgtaaatatgtttgtgtaaaacactataaggaattgcacttttcccctaacctcagtgtgtaagtaaagccaactttatttccttacacttacaaagttgttgaaatgacttaagctttacaagtggtgcagattagaatgtcaagtccaatgtgttttattcacttgtagagcagcatgtggtttaaattgactactgaatggccaaagaacccttgtgaatttaccatcataaattctctgattacaaattcaaattgtgtggttttatgagataatagcaaaggatattcttagacaacaggttgaattcatacaagaggcattttgagccctgtactgggactgtatatttttattgcaggcagtattcctgcacgtgcggagacttattgaaaatgtaatcttaccaagtagatgatcttttggttttcttttcacatggttaaaaaaatgcttatttcccattcttcttttcatgaacaccattttaccagtgaatatttctttttttttcatttgtcccattaattttttcctcttcaggtgtaatctagctcctgtggtggagtttgctgcagatgtgggaactaaatcagattttattaccatgaatccatcagttgtacaaagagcatttggaggctttcgaaatgagagtgacagagaaaaatttgtgcatagactttccatgctgaatgacagtgtcctttggattcctgctttcatggtcaaaggaggagagaagcacgtggagtgggttaatgcattaatccttaagaataaactgaaagtgcgaactgcctatccgtcattgagacttattcatgctgtcagagggtaagtgactggaaaggaccagtttgtccttggcacagtggaacacatataactaaacattttcactagacaagaataagcttcagtaaaatctccaaatggatatatgtttccgttattttataatggttactctatttacaaacttgaagtttgtttatgtacgatatgattttaactcaccctcttttttgaaaaagcaaattgttgaamctggcacttatttatgtgtgttcatgaacaaamtactaatttttatatttttgcactaaaaagtaataagaattcatagtaaaattaatgagctttgggtagggaaactacaacagaagtgctgaatggctagtgggcaatattgtgtaagcataaatgttagatatatttaaggagcaattaagtcccatctgtagccaagaggcctagtagtgagaaaggaggctggctgcgataaaatgccttaatgcttccccccaaagtcacagatgctgttttaatgaattaagccaacatttcccttttattaacacaagttcagaaaaaagcattaaaatataaactcttgcttaaaagtggcaaatgaccaaaaggccaaattcactcatgcacacatataagtatgtaaagtagataaaccacagatgagaaattatgtatttttactggaagtgtactgagtgtcagatactgtagcttcaaaaatgaagagctgatcactacctttaaaaaatgcataggctttatggtacagacagaggcatatacaattcactagtggcctaataggggaatatgttgtcagaggtgtataatttgtccctcaggttcacaaagacacttggaaagtggaccaaacatttgaactggactttaaaaacagaatagcaattgccagagggataaaataaagagaataagaaaaccaaacagaaggaaatgctgttgcattattagagggtaccaggtcaagcaaatgatgaagtgcacagtaaacgtatggaataatggagtctgttgtggaacatgggaatacaaagttggaaaagtaacttgggatgtggttgagaagggaattgagtttatgctctatgaagcacagttagatgtctgaatttaagaagaaatcttgtaactgcagacatttatttgacagggacaagaaaaatgccagaggcacaaaaaccaattaggcttttgattaatttactcataagataataaggatgtaagacagaagcagtggacttggaaaggaagggcaagttcagggggccaattaaatacaatggatacaagtcctgaaaaaaacaggtttccaagcccagacttaaaaatagtttcttatactgtaataggaactgggctaaggtatttttgttttgttcctgagataatttcctgcaaggatttaccatttcctgtttaaatctctagatagtttcttgtattgtattattttgcacacaattaaattacattctttttttgttttttgtgttttgttttgttttgttttgttttttgagacagagtctcactctgttgcccaggccggagtgcagtggtgcgatctcggctcactacaagctctgcctcctgggttcacgccgttctcctgcctcagcctcccaagtagctgggactacaggtgcccgccaccacacctggctaattttttgtatttttagtagagatggggtttcaccgtcttagccaggatggtctcgatctcctgacttcgtgatccacccacctcggcctcccaaagtgctggaattacatgcatgagccaccgtgcctggcctaaattgcattcttataattagatcatgtttactcaacacacattctcttggtggttgacaggaagtttcaacaaaataagataaaaatactgcatttggagagtaagtcaccgccttttttttttaagttacaaatatccctggtaattacaatttgactcttaaaaaaatgtgcatcttaagaaactgtaacattacagtgcattgtgttaagaacatgtctgtttttgtttgggtatcatgttactctgaaaaacaccttaaaaagataatgtttccatcttaaacacayacacacacacaaacacattccagtgatagcagattaagttttagaaagaaataatctgaagtaagtcctccctgactatggaaaactaatgagaaaacttaagattactctgaattagtacctttgtttcctagattttggtttatatttctcaatccaataccaaaaccaaagcatgaaataagaggagtgactgcagtagtgcattttcagtaagttagaatccagatagtgttatatatgattaacagtgaatacacatgggtttttacagatattttaaacataaactttgcagattcttttagtaatttaacaagactcctatcttttgtcctattcacttttataaccattataaatataaactacttcactaattcctaaccattttattccaaagagcaacaaggccaaacttctgaccactggtgaaaggaatggtatgctttttttggttactatgaattaggcatattttctaaactgattttgaattctgtagaaataacttctctctccaccttcctgttcacaaatctacatataccctcttaaagtgtcaaggtattgagttctaaactgtggccaagaataatgaaagtagctctagagaggcttgtgacttttcaaatagaatggaaatttgtacacatggtgtacgtgtgaaaggcaacttcatttatggattttattgaaactaatacattgatgtatgtaagatagcgttttgacctaatgtgtgtacttgctgctggaactgtaaatgaaaataaggaagtgtgagcgctgatgaaacaaaaatgatttwtgtgatatgaaagcaaaggcaaactccccaaagaactattctttaagtaactgttttacatctcctttgacttacctctctgaaaccctgtggttaatacagttcagcaaaataagaagtttcatatcctctgttgattactggagttggttgcctctcatgagcaattaaagcacccaagacacagaatttagggtgtgtataatcataatgttaaaatgtgaaggctcttccaagtactgcaattaaaataaaaagtttmagtgatttgtaaaacaagattcctgaacacagtgaggatcatttagatagttttcatatggtcagacatcattacttaaacattttgccctccaaaaactgtgattccttactaactttaaaaacctatttaattttagatttttctaaaagctctaaagatgaaaccatcagtcacaaaattcagatactcttaggtattgttgtaatatattgtcattcttttgaaaccatattcagtaaaacagaaggaaaagatatataggtagattcataatttaaaaagaatcttgaaaaatagtaagagagtaatctaatggggacaaatcagatatataaattgcaagtttaagagaatgtatgaaagcataaaattggtgtgggattgccacttttttactggtatttcttcagaagccccacatgggctgcatttttcaaattaacattttgtatttttttttttaataaagaatggagcaattttgggcccagtgcagtggctcatgcctgtgatcccaacactttgggaggccaaggtgcgtggattacctgaggtcaggagtttgagacgagcctggccaacatggcgaaaccccgcctctactaaaaatacgaaaaagagccagatgtggtggcacacacctgtagtccccgctacttggcaggctgaggcaggagaatcacttgaacccagggagggagaggttgcagtgagccgagctcatgctactgcactccagcctggatgacacagtgatactccgtctcaaaaaaaaaaaaaaaaaaaaaaaaagaagagtggagcaaataagatagtaagcatgaagaggggatttggggacttcaaagtcatttaaaaatttggctacaaaatgtaaaataaaagcttcttatttatacagttctaagaaaattattaatatacaacttaatatcttaataacctgtttaaattaatgacagttttatataatattttaaattattatctaagacatagctcaaatacatttttataaaatacttagagttaggtaaaaattcttattttacagttactttaatttgactagtaataaccaagtgttgtttttactttggtgggatgattatacttaattttcttacttttaatatgggaaaaaaacaaacattacagaaagtgtatcctcagtttcaatatcaaactatgacgagaatttcttaagaatccttccaaaaaacctatagatagacagatagatagagaagcatattttaaaattatgttttatatgcacaaacctaaatatgtwtttattgtagtagctctacaactcgaatcatatgtactcttttgcactttattttttaaattaacatgacattttctcaacaacacataaatacagcttgttttttttaataggaaagtatattccattatatacttttctataatgtatttaaccaatcttgtttgatggacatttgtagtacttctcatttgttcttgttgtatataattttattttgttattaaaaatattttaaattataggaaaaatgagaggtagggaaaggaaagtaaatatacaattctggttagctgattttataaactaatagtatattttaaaatataaaattaatgtaaagcttacaataggccgggcatggtggcttatgcctgtaatcccatcactttgggaggccgaggcgggtggatcacttgagatcaggagtttgagaccagcctggccaacatggggaaaccccgtctctaataaaaaatacaaaaattagccaggcatggtggcgcatgcctgtaatcccagctactagggaagctgaggcaggagaatcgcttaagcccagggggcagaggttgcaatgagttgagatcatgccactgcactccaccctgggcaacagcatgagattccatctcaaaaaaaaaaaaaaaaaaaaaagtatggttacaataataattctgaacaaataattatatataaactagtcttatattaccttttcaaatacaatatcctgaagtaacaacagttaatatttactcttattcatctatcctttttgtctgtttatacatatatatacacacacgttatatatatatatatacacatctacacaatatggattcatttagaatgtgtttttttcccacagaaaagggaattttaataaacacagaggtatggatgggtttaaacctactgaatactgtataatatgttcccttctgaaaatattatctgtattcagatattttaattttaaacattaagcttttgatctgttgatatttgagtctgggaaaaaatgttaaaatatttacgttttaattctttggcccctgctaattattatgaactattattaaaagatttaaacccaaaatgagatatttaactcaattatcgtataaatttttatggccccttagttttttttttaatttttacttttttaaattctactataacaaaagtaatatatatgtaccattttgtcactacattataagtagtaatttgttttaatataatggaggttatgctctcattaaattaataagcttctactttgtattaatcaagataaacacttggaatgagtactcacagatgacattgataaatgtatataatattctgtgatgtcaccatcatagtaaataattctaaagttatttaccatttttaaacttacatctttctcaaaaaatttttaaagatatttcatatagatttttaaaattttgattccatgtgtagtaatatggtgcaaaagtagttgtgggttttgccattgaaagtaatggcaaaaactatgattccttttgcaccagcctaatagtttttgtttttgttatttatctttcagtggagaatacataagatacctgtatacttaaaaaaatatagtcttttgtagtgattgcaaaggacgaatatgtgtaagataaatgggctacataaactgccttagatttgcctggaattaagaatttttgtttttattagaaatacttggtaaacatctcatgccctacaacagtgtttttttgtttgttttttgtttatttttgttttttgggtttcttttttgagacagagtctcgctctgacgcacaggctggagtgcggtggtgcaatatcggctcactgcaacctccgccttctgagttcgagcgattgattcttctgcctcagcctccccagtagctgcgactacaggaatgaggcgccacgcccggctaattttttttttttctctatttttggaagggatggggtttcaccatgttggccaggctgctctcgaactgcaacctcaggtgatccatccgccttagcctcccaaagtgcggggattacaggcgtgagccaccgcgctcagccagcagtgtttcttaaattcaagctcacatatgtattttgcaggttctgcgaaaattttcttgattttaaagaggatttgaacaattctaactaagaacactgacgtagagaattttgaagaattacgcagaaatttgatttccaaggaagacgaaaacaaacctttcctattctgactttagacaagactgtttaaatccttgagtgtcagatttataaccattaaaatatacgtaccaatgtatataatcgtatagattcctttgggctctaagaatcactggttctgaactttgtccttacacatgggaatattcaaactgtcacaaaaaaactcttgtccttaattaaacatcctcaggaatgtattctctgtaacttcctaaacaggttcattaaatttttggtaattatgataataaagatagctttctaaagtatttcttctttaaagtcattttctcttgatatttattctttacatgtttcaacaccacagttaagttaacccaacatcatctaaatgtttacttgacagcagaagaaatatatataagaaatatatatatttgaaatatataagaaatatatatacacayatagacacacatagttacacattcatatatataagcatgtatatatacctaggtaaatattatataaaaagaatagacagacatgtttgttgctgaatttgccctttctttgatttctgcaattattaatttttttaaaaatgcgtaacttttttgataaatgtcaattgtggaaaacctatatctgaagtagtatttatttgttatatatatgaaaaataaaattagtatacatacatatttactgttatatatacacacacactgtacagactttatatagtctatactcgcgatatactttctttgtaaacacacacaaaacatatatattaatatattatatacaattctatgtattctcttgctgtttctctgtctctatatatactatacagagtatatatactctgtgtgtatatatgtgtatattctttgtatatatacacacactgcacatatatagatatactgtaaataatttacacatactaacaaagtataaaatatacaaatatgtattttatataattatataatatgtaatagtatactcatagtatatatgtttattattctatacaagttactttgttagacgttttgtatgtcaaacatagtgccaatatatattgattttcttgtaataawggtacattactgaatcttattcaactgtggtcacttaggattttcagaaatcagtttttccatgcttaatgtatagtaaatatccccccttttatatttctgttgttggtgtttgacatgccatcttgaatttatttgtagtaatttcatcttttgttttcaagtagatattgttttacattattactttaagtgactaaataacttttgaaaaatttcctcattcagaatataagataatagtctaattgatttacatactttatatgcagtatcttttttgcttcattatttttattaaataaaattacagtgaacaagaggatatcacttaatgtacccgcccaggattcccagagttttgctagaacattgatattttattttggcatacctttctaaactacctgtgcccgtactttacaccacaatgatcaatwccataattcctagctaaatgtaagagggaaaaattacgtcttacggatatcaagtgacatatctagctaacttctcatctgggtagtattcactctgttgaaaaatatttaatggttattaaaagaatgaaagcacacattagttgctttggtagaatattttttatggtttctaacaaataaacagattatattttcacacatcatccatcaactttttttcagcattaagactaacaaaaatatcatttctcaaatgttagttgctgcactcatctttcagatgtaaaaattcattttaaatgaaagtaaagsttaaagtctatataaaatgaagatgaccttctgcaggataacttcatgtgaatgtcatgggtttgcagaaggatttgaatcagaccaggctcccaatagtctttagcaaaactataggctaaaatacatcatcaatagacctcaggaaatcaagtttattagtcactctaatggattgttttggagtattcaatcaactcaagtcacataaggaaaagcaattttaaaaaaacaactttgaaaagagaatattcactccaagtgctttctgaaaatggcttacttgttttaaaattagtcttatgctaaaaatatttccatatggtttctattttgacctatgagcaacacagctgtaatatttctttataaaacatgtgtcctagtttaatgtttttgagtagctagatgcygcgtattaggtattttaaaccaaaggagatttccatgaaaggatatttctttccttactggcagactctgatatgcacacttccggaacttcagtgtttcctgatattttaatctggttacccttcagtcacaatgttatttcctagcagatcccgttattcatattgcattgtgtaatgtggargtataaatagtttatgtctgagaagatattcccaagtgtgtggctcaaactggaacctatggaaaacagctttcattctgcccctgaccaatatgcttcccagttctggttatctctcactgagactaaaaggctttgcgaaatatctagaatttctttggaagagtagttaagctttcatagcacccctgtaacattggcaaatttgggctttccttcttggtatggatttttctctcttcttcacatagatcattttttattccttcaagtctcaatttaaaggttaagtttyaattgggcatcatttctcactctttttccttttggtgagattgacctgggtttctgctctctgtattctcttctcaagggatgtatttcccttttggaacattcttcataatgtatgactattgtttattttcaactctgtaggtttattttaaattttttcatagcaaagattgacttattcatctctataactaataagaagcataaattcccagtatatgttacggtggaggttgaggcacatgtgcaaaggggtggggaataaaaatgggcaaagttgtgctgaagttagacattgcartttggttcagttagttctctagagcaattcaaacaagcagggaaccaagcagaattgaggaagaggtttttttcatcgatctgggtagcactagaaattattttcactaggcagtattgtgaagaagagggaaactttcaagaaggaaggcttgaattctaaatagtgaggatgtaatctggatagtttgttttcctgcaatttattattaatcaaactatgtatcaacttgtgccctgaatctactaaattatgaaattaatgcttactaaattttacctgcctgtggtgttgctagggtaaaaataaaagagcaagttctgataagaaaagtagatgaatcataataatgaggcatgacgcatgggagcatccagtttgaccatctataaattcatcctggccacctgagaaaagtaccctagatctataatttagtaacagttttctcttgggtgttatctttcaaaatctgcataaagaaatcaatccattattttttaatattaatttatcatggtgttcaatagaggaaaaatcgttactaaaaatattttagctggggaaataaattaattgtcattattttataaattctaagactaaaatttcataatcagaacaaagcgctatactgctatattaacgractacagggaaagctcaataatttgttctattaccttttactttcaaggctcaatcttytaatgagtgatagaaggtgcacaggtaacctcggaaattcccttgtttatttgacttttcaggagaaaagaacattgatcaatatgcaaaatatatactgagttaatttgcattaagttattctaatttaagtcaagatgactggtcgattacgcattcagagatttcttatatatagtaaaataattaatatattttaactaattattaaatattaaatagttgggagtttaaagttaaatgcaaatataaatttttagacagtgaacatgactagctacttcctgagtttgtggagaaaagttatttaatcaatattcccataaatctttgaaaacattacaggtccttatcttcttcaaatgatacaagtgtactttagcttgagtgtaatagtttagattaggtcttttgtttctatgtgattgatcatggtcagttaactaactctagtgtctcatgtggttgatcatataatcacagcctcaggccacaacttccaaattatggctatcgccatttgtcaagccagctcaacatacaagaagtaagttagagaataaggcaaaagacttggggcttgaccactagaattgccatgtaggaaacaagatactgatacattctgccaactttttcagagactagtgtgccatatcagattcctattggtaagagatcaaagaaagagtcatttctgtttctttttctctttgctctaaaaccttaccccccaaatcatttaaaaacctggatgagtaaatacattgtagcagaataagtttaaagcctttagctataaacttatttttaaagtggctttaacaatctttttcagttatttgattacataaaggcaagtattggagccacattcaccagaggcaagctggaagttttgtttcttacagtttccagtttgagcctaacacctatgactgacttcttagaaataagccatttactttttcacattccatggataaaataaatcaaaaagaatattcagacctacaagagaagaatcacaaaatagagccctggtgaagaccagtatccagtgcaggaagtaaaatcaaaatgcagtgccctgattctgatacctctggcagcctcccctcatcaatgtgtgtcccaaatagccagggttattctatgttccccactattctgctggatgagatttcttgtttatgtgttagtaggtgcttgtactctcccttcaagatagtacatttatgattgagtatggttttctgaagatcatatttaaacataatacatggtggttgatatatgtgggaaatattgttcaatagtttcttttgagatcaatcaaatcacattatatacgatgcaaattcttacacaactgtttcatccagatgatcttatgctggggctgtcacctgtggagcataagtgaaagcaaaattataaagtatttgctcagttcttaaggaaggatacttgccatcatatcttaggaactctggccctctagtataacattgtgcctatttgttggcaaattagggagccatccagatggtaccatttttgtacattccgtgaagaatttctgtccctcttaagaccttgcttcaatataactggaaaggctttacgtctcaatgagcaccacctaaacttcaaatattggagagagataataaaatgcgtaaataccaagtaaggtgtaaataactgatagctaattcattcttaggggcaaataagttgttgagattaaaagaagggatttataagggccctatgaacatgttttgggaatttgcagagcaagaagtggaaaatatgttggagcaacagtatggctgacttccattcctcatgataacgcatacattgcatcttcattcagatggatcatggttaggcatcatagttaagctcagtaacaaaaaattgtaagtgacaaatcattgctctgtattgtgtaaatgcctgctgctttttttatttttacatgagttttcaacaccagacttcatttcttcagcaatgatattgtttagctatatcctctggttaagttttcctggtgagaatacaagtcgaatgctagcatcttaagaactcagttacaaacactcagttcttacctgcttccacttttatcctccaaaccatcttccagtgaccatgttgatasctgaatggaatatgttgcagagggagattgtgctggcagttgctaccttatttctaactaagaataaactgattttgtttcagacaatataaacttttattgtcaacatcaaattgttttcataatgaaagtatggtctatattgcttttcccattctctaattagtcatttaaagtacactcctaaagaaaatattgccttttgatgtcactctagagatagtaaaatcagtggaaaactgtctttctttaaaaaataaacaaaatgataaagtgatgatataataaagtaattaggaattcttaggtaaatagcttatatggatttcccttaataaattattggcctttataataggagcttccttggcctttatacaaatttcagcaaactttaccagtgttcattaagctatagcatcaagcaactgagttcaactttaaagcttccttgttttggatactcaacaatatttgcatcagttacaaacttggatgaaattaaatagctaaaagaatcatgtgactgaatgtatcataacataatctagcatggcacagattctactttacactattaatatatttgataatttgatctaatagaaactaacttttttttcttttcactggtgaatcttaattaaagtaaaatcattacttgcagctaaagttctgattctgcattttattcaaattatgatcatattcctctcaayagaattcagtgagctttttgcaaaaaccattttataggcacrtataaaatctacaatatggcaagctaaccttataccaaaatatatgtttctcaatactgcttgaaagaattgtacagtcattataaatgttaatagcccctatctgagaataataaaaactggggatagtgttgaggtgggatgtgggcagtttatcaaaattttcagctttgtttttgcttcttaatagtcaacttttgtttttgtttttgttttaaaaaaaggaacttgatactttgtggaatccatctgtgctataatcaaataatccatcagcaagtctccattaataaacgtcgctaccaggaagaatcaatgttgctaaaattttgttctttgctcagctcacaattatttcctctttctgttttctctggaacagatgcatacaccagaattgctgtcagtttcaaaattaataagcyaattattttatgagaaataacacagaatatataaatacaaatattttagtaatgtacaaattgcaaattcctatcagactgaataaaagtgaaatacagatatttttcattaaaaaattctattgaagtagtaaaatatttgaaatcacataattccacattttgaaatatgaatagaagtgttcctgctgtatcacgttcattccttctataaacatgtatagattgctatactgcgctaggtctgaagctccaaagaagaaaacaaagcaggggcttcctcaagcaacaaaaccagcttggtagccaacaagattacatagggaagtgacaaggtagttttggaatgctagatcaagggatttggcaaatgcatgtaatacctctggtggatgggacatgtaatttgtcacygattagagattcacagaagagattccaaacagtattaaagatcagctaaaagtataggctaagaatttacagtaatgcctatccacaaattgtgtcagaactatgttaccagtggagggtgtctaggtttttggtgtcttgaacaaataattggacaaaacacacaaacaaagcaaggaaggaatgaagcaacaaaagcagtgaattattgaaaatgaaagtgcactccacaggatgggagggggcccaagcataggagctcaataactgcgctacagaattttctagtgtttaaataccctctagaggtttccattggttacttggtgtatgccctatgtaaatggagaggatatttcttgtcatagctgaagtgtttccatttgatttagttctaagaagtcagmgtgaattggccttatgttccctgcctccagaccctatcctcctgcctcagcaatatactgcataattgacctctttttaaagaaataagcataatgactccaatacctatggcttgaataaaaatttgtgttgatcccaatttacaaaagtcccagtttacaaaaagcatcaggttcccaaccataattttacatactcaactttattctagaagggcatggaaggcaataagagtaaacagctatgcaactatggaaatcagtaacctgtgtagaaattaccaacatgacaacaaaaatacgttccaaatagatttatgaacctctcttctttctttatcatgatgtacagtaggttttgcatttcccttattttggctttctcatttaacttggtgtgcacaggaaataagtttttgaatgtcttactgtgacactgagtgtgataatgaggaggcatactgtgattgcaaatggattaggtgggggccagggaaaggggtacttactagagaataaaacacacagaaacaatcttttttgaaaaaacaaactatcttcatttgtttttattgtttggaatatatgtaataagaaaactttggggacttttttttttcttatattcttaagtaacctagagacaagaatgttataagaaagaatgtaggctgactggaaaagagaccctaaggaagacagaaagctccaaaaatgttatgggctagtcaggagataatataggcattcatcttcctctacagtaacttgtgtgttaagaaatgactttgccttattcaagcactgtgagtcatgatgaaatgaaccgcttgggggaattttgcaactcgctcaatgttctgacccttttcatatttaggtatgattggggattttctaaccaagctgatgatgatattagggaacattttcatagcttgttctttagtccattagagcaacacattgaaaactagtttcatggtatccttgaaaattccccaacttgtaccctaaaaaaaaactctaaaattgccatgtgcatatgtatgtatatacacacacatatatataaatagacacacatacacacacataaatatttcatcaaacaactgtatgtattctctgctttggatttctttaaaatagcactacaatcttgttaaaataagtagaaaatactctaaaatgttaaaataaaagggtgaaaggaaatttataagaacttggagaaatctaaacacatttgaaaattctcatttcaggtattagacaatgttgctgtgtctcactgataagaccaaataagatatgacatgatataaaagtttgggatcaggaacagtttaaaaaagactccgtatgaattgaaaatattaaaagtatatatttttatttaaatatatgtatatattatatgtagctaatgcttacatatggaaaatattttcatgattttttgacataatccagttaaatttcttattttataaaggaaactgttgcagcccagagtctcatctgctcaaaaatagacactcagttagtggcacagttagagttgctgattccaggagcagctctctttagaccaatctcactatagaacagtgtatctttataatagcatggcaatatttgtgccattttatcatttctttttgatgtatgatttttcaatataataaaacctattgatttagagacccttgtatgtattgccaaaataatattcagaaagtgagtgctttctatttatataagttatcacagatcttgagctgtttctgtcttgtgtttcctggccagagataaagagaagattatttttcatagacaagaagaggaaacaactaaattaattgcctttgtagctagggatttatagttcaaactttggacccaagtttttaaataattctaaaataggatttcaatggttattttttcaatttaacaaagagaacataaattctatagctgagttctgaagcatttcattaaatttaagttcatttatctgctcaggctttcagctgacatctgcagagcaaaatcaagatcttttctggcaaattgattgatggtgtgccatattatttataaggctcaaactatgtacatttgaaatattttcatttaaatgaaatttgaaacaagatatgaaaccttgcaatatgtatttacccagaaaacaagtgaaattcatatcataattaaatataatttttttgcatattctaagttggcaaaaggttatagaaaaatttttaaatgggtgggtgtggtggctcatgcctgtaattccaactttttgggaggccaaggtaggaggattgcttgaggccaggagtttgaaatcaggctttcaacatagcaagccctcatctctacaaaaaagaaaaaaaaattaatgttctcttttaagtgcaagttttgtcactatggtttaaatcattttgctaggaagtttataatgtggatgtcatagtgttggaaactgaatgccaccattttatgatttgctgaaattacccagtagcaattttattttctattgtacatatttgctagtctattcaaagcaaatattcatgaagctatagcaaaagaaactgccagagaatagcttctaagcatctacagtgttgatgacttacagtgagtctctggaattcacagaaacattttcattataaattcagattaaattaattacattcttatagataaataaatacttgtaatatagtgacttttaatttgatatttaatttaacaggtttttttttctctagtgctccaaatttaatcagttactaatgttttgactggaatgaaaaaaatacataatttacatattacttctggccaagatgtattttggttatgttatttgatgtgtattcgttagcagtctaagtaatgtaacattggtcttcattaaaatctctgatttctttcatttatcttatagaaacaccatactgtaatttctgttccttcttctggttgtagaagagaggtagcagactcatgactcacagtttgacttggcctactgacctgcttaataacacagatatttaaaaatgaaattaactgtcaacatctaagtatcatgagatttttcaacagacatttcaatatctggtgattcttttaaagatcagaatatctggcagtcctagatctctatttcttcatgattatggtgaggcagacctaaatcgtgctgtcttctatactctaggcactgacatcctgtccttcacagtcccatgtaccgctttgtctcatacatcctgataacaagcctgattcattcatcctactttctggttttatccagctctctaaccatttgttttactattctgccttatgagagtagaatgaagtataaacatatatggtaattgattcagacactctcagaaatggagaatactgcatagtttccaatgaatatctcatttaaaaataatgacattaagacattcttgggcagattaagtgacttactaagacaacatatacaatagctaggtatcaaatatacatctttcggcatgagtttaagaaaccaaatttgaaacagttgcaaaaaagtaggccacatttcaccagtagagattcctttcaggcagtgtgtgctagtaaatgtttcacaactaactctctgggaaaacaaagtggatttatagcatttgctgattttcataatgtaaatactcccaccatgcccaatttcaaactaatgaggagatgacaagcagctcacaaaattccaaaaaaagaaaaaattcactgtggctctgtggatcagtaagggccagctctagcacaycagaataaacatatggttcaaggagattcttgtgtaaattgggtgaagaaaactgcagctattaacattcaggcttaataaatgaaatcatttctatcacactggcacctcaatcagaaatgtctatctcatgtattagaatattttctttaaattttagctgtcatcatagtttagattggccartgcaattgcactggcaacagtgatatctgtaaacacaaagtcaatagcttttacagacttcatcacttctggtttattacaccaatcaaatatcaacatgtgtaatggatactttatataataatccctaaagtggagtctctaaatattttggacaaagaaaaagtatttaaattcttcatcctcctattgagtttggactggctaaatgcttttgaaactagttcaacactggctccctaaagcacttgtgacacttactgatgactcaggttttgcaagtggaaagtagagctaatgatcagaatggtatcttatttccctcaggtattacggtgtgtgtgtgtgtgtgtgtgtgtgtgtgtgtgtgttttagcactaatgagaaaattccctagacttcctttagagttcctatgtgtaaagtcaatagcgataagtgacgtgggagtattttaacctggaaattggaaagkaagtctccaaagtattacattttaacgtcagtacggaacagtagcaattttctctgatggattttatttttttccaagtttcagtcagtgttttctaccaaatctaagtaaaaaattgaatctggagataatgcttttagaatttaaaaattatgaataattcaagttgattgtttaaatttcgttttctttaaaaaaaattatttgtccacctgggagttatgaaatgatatctttaatttgccaagttggagaagtcaacgtgagatttaacatttgctgtagaaaagtgaaagttatttatttctaggttatacttagtaaggagtaccatatatttagttgagaaagcatgtgaaccttcctttctacattcaatcttaggtttcttttctatgtatttttatccattagtagtctaccgtacctaatgacaaatctcagaacaatgcaaaaaaaaatgaatgcagcattcaaccatggccaaattaatagtaatactagagatccagctcaacgtggtctttaggggcacagattctggagccagattactttgtaattcccagttccacattttactagctccatgactttgtgccagttagttattatcatcccttatctgtaaaataagattattaagagtgtctactcatagggctctgagaaatcatttgagttatatgcaaagcgtttagaacagtgcctggcacattataagtgctaaataaggcttatctctaattaatacatcactgaaaaatagattcagtaaattttcctttgggtaattaagcaaagctcatttctctctcaaggtatttctctctttccagacaactcttccctttctgcaggtttatttaaattaatcacagttgttctaataaagtgtcttgaaatacataaatgaattttggttagaaaaacaaataggagacctagagatcacatcttattatgccttaccttgatttcagaaagtaatctactaaaaatatctgagtttatcttcctttttacttctatatctctctcaatttagattgaagtcaactgatggttatctttctattctggtgaatattaataatgaatgaatatgtccaatgtatcccccaaagtggggataggtccattccaaacttggcagttgaaatagctgtacattaattgttggtgaatatctatggacttcactatgttacttccgaaacaataattggcaaccacagcatctataatgacgtttttatattttaaacttcatcttaagcttttcacaggagtgacaagtacaatctcagatgaaaaatttggtatgaatgaatacgaattagtggagaaccttattttaaccaccagtaatagcaatactgtaagaagttaactttccaatatttatctttaatagcattacacattttcaaatttcaagtagccacatttactttggttgaaaaaaaagatttttaaaaatttagtagtttttcccatgcattttcctactcatttacctactttcatgtgagtataacttaatttgtttatgatggaaaaaatgacaacctctttcaaaataagtagagaatcattcctggctgtcaaaatatctcacaattccatggaaaattgattaactctccatatgataattcaagggagaagtgtcactgtatagctaatcatgtgccatttactaatagatctgaacttacgggtagctttagcatttgtgattgaaaattttgtgtacaaacagaaaaagaacaaattaatatattttctggaatataaaaatgctacatctataataacaagaatgtaaattggaaracatctcagccctagttccttgtttgtttttcatttcacccatgttttacattttgaaaaaaacaataatccaagaaggccggatgtgttaggccatttttatgttgctataaagagataactgaggctgggtaatttataaataaaagggatttaattggttcatggttctgcaggctgtataagaatcatggcaccagcatctgcttggcttctggggaggcgtcagcaagcttacaatcatgacaaaaggcaaagtgggacaggctctcacatggtgagagcagggtcaagagaaagagctgggagatggtacacacttttaaacaatcatatcctgtgagaacccactcactatcgcaaggacagcaccaagccataagggatccacccacatgatccaatcacctctcacaaggccccacatccaatgttgaggctgacatctcaacatggtatttcccagggacatagatccagattatatcactgaatcaatttgatcagtagtgacaacttaagaaagagaaaaagtaataaacaataagagaaacaatattaaagctttagaaactcaaaactgtcaacataaaataaataccataataatacctttttagcaattacattttaatgtccccattcgataccaaattataggcattttcatagataaaaatatttctttttaatgtcagttaaatagttatgagataactgtgcttaatatttaaagttttactaaatgctaatttctaatttctaagcattctgctctctatgccctacaactaacaattgctccttttgtcactagagcgttctatgttttattattcttttattcttctacctgtctaattctattaaaaatggacctcagtagtacatatccatatacattatatgtgtgtgtatatataaatgcatgtatatttagatggaattttatagaaataatgtcttttgattattatattagcactcatttgattaagatgatatcctaatctcttcaatatcctttaattctttcattcacttattcaacaaatatttattgaacatattctaggtgccaggcattttgctatatctgggatgcacatttgaattagatacagttcttacctcacttggataattatattgttattaggaaattatagtaccgtacgataagtgcaagatgagtgaggagtggatgctcttggagaatcccttctagcaaaactgagttaggggactgattaaaagaaaaaggcctgctgatgaaattgacattctagttaatgccaagaacagggaaatacgtttcaggcagagaaaattacatgtgtaaaaccagaggcctttttgttgtataatattagttaacacccatgtaacactatatgccaatcattattacaagtgattttcacactatgtaaacaacccttttgacataggtttgttattactcctatttttctcttgagaaaactgaggaatgaattagttaagtaactttcccaagttaacataaccagtaaaattcaaggctgggatccaagtagcttggttccatcatctgtaagtttcctacttcctctcaattccatactgccttttacaataaaaatgcacagaagatttaatttattatgctaggtattmattttgcagcccaatcaattgagtaaaataatttgagaaaccaacttacaaacgtttaaataatacaaaaaccctgtgtgtcatcaatcatgaatttyaactcagcaagaaggctaggaatttacttcactttaacaaagatttattgtcttcctctacatgcaagactctgtgctaggtaccagggatgtaaagatcagttagtttaatctcttccctgaaagagttcacaatttttcctgcaaaataatatgttaaccaataagaatttataaaacttatgccaaatacaaccaagcagacacctacgtgtgatataagggtacagagtttgcctgactcacctttgaatgcatagcacgatgtatattacctgactaaagatagaatgaatgaatcaacacagcaacatgctataaagggaagaattactttcctcagggtaaatcatgagatacttcattaaaaggaggcatttagggcctgtaagagtggattggattttcttaacggaaggtggtagagtagtaaggtagatgaaacttgacacatagagggaaagaggagcaaaagcaatagagtagaaaagttagaactgaataagaacaatgagagaatgtcctgaagagttgggttggtgtaagtttctagatggcctcgaatgatgtaacaggagcctataagaacattttagaggttaatttgttaccctttgtgcaaattaatggtgatctaaggcagactaatgaaaaaaagaagagaaggaaagagatatatgtggaagttagttagggatgtattaagattatgtttttagaatgctgcaatacattttagtgcagtaacctacattaactgaaaaagagagagtcatactttgaaaataagaacaatctccttcatttcatttatgggcatagcaaatttctcttcttatcattgcagtttctgtggtccaaagcatgtttgaaaatgaaacatctgtgatactgaaatatcttcaataacaaaacatctgcgatacgaaaatrtcttcatttttttttagaaattgagaaggcttcccttaggcatatgtcccagatatacagtatcacatcttagttataattgaaaacactgtggtgccccaatagagcctccaaaagaaaaactaacccatatggatttaactaaaataaatataaataattaattaaataaaacctaaagtgtgaactgatttgtatcaaagcttctgctttaartgtcaatgagcagaacacacttaatccatccaaatatggagtgtttgttattgatatttagtatctatgtagagaaagattaaaatagcatttaaactaaactagattctctttagaattcataggtaagttccttccttctaaatatttcctagaaccaatattttaaataaagttatggttctagattctgggagtatactcaagtatttttgacttgcatacaatatgtagattcccatcatttctcaattcctgtgtcacctttccagcccctctccccataacacaaaccaattgtagaaaagttagttcgagttagataaagaaaatttttaaaaaatatatattttttgagccccctgaccctcagagataatcagacccaactcatataggagcattttagctctatgcattgggcctgatggacaataatttcagtggagcagagatagtggagaatgaaagaaaaatgaatttcatgaaacacaatggagatgagaaaatatgctgaagaagagttgtgtctctgcatgaaggaaaaacaatggtagtaataataattccatttattgaacatttattttatcattgaatcatcataagtaggttttataagtctttttttaagatgaaaagaattgtgcctcaaaaagaattaaaaaaaatctggttaagaatccaggtgggaagttttagaattgataaatgttttatgtctcaaggtataattttagtattttttatagttacattttggagattgtcttgatgtggcacctgcaaggcattttatacagtccttttgtggttcagtaaacagctacctgggccttagttatgggatagagactgtcagtcaccccagggtaaggactatgtcttttctcatctgggcctgttcaccagccaagtacctggagaacagtagttccttcaaaattaagtggtcaatggagaacagaagcaataatgagaaaagaaataattcaaaaagttaatttaggtagacaaatataattatataatgtaactaattacctctggcaagctagctatttcaatttcaattaatactattgaagagagttgtcactggacatttattataagtcctatatgtatgtgtaataggttttattttgagaagctataggtctaattttaagaatgcattggttatactgtgctttaccaattctaagtaaacataataaaacataatatttatatttgaagtcatatgcaagtatagttacataaatagatatgattactgaatctcctgtagaaattatttgcttgtatcctttaaaaattaattttagttgtacttacacacatatatttcttgcatatttgtacatttatgcacacacatagacaaatataatgcaaccatttgaaataatatctttgtctaasttatacaataatcagttgccataccattcttkatggtgtgtccttgactgcttgcctgaactcatgaagttattacaatatattaccatccagaaatattataacacataaaataagtctgttgacggtttatagaggtaacttgaattcggaagaataaaatatttgatgtatacggatatctgctgcatatgacagtttctaacttagaaatggattaggctttaaaaatttgaaatccagataggaaactactggctgttttattcaacgataaatactacagtactaattatgtgctaggcattacttaaagcactttacaaattttactttatttggtctccataacaactctataaggtaaataatattcccattttattgacgatgaaataaagcacaatgaaatcaaatatcttataccagctcacatagtaagtggtaacactaggctttgaaactcatcggtctggctccagagtctacacccataattattgcacagaatgtcttgtaaactctattccctttcacttacttgccccttgtaacaggtcttcaacagttttgcaagcgattgctaaagtcttagagcgagccacataagtattttatcttcagtgtggcacatttatgaccaaagattgcaaaaataacatgagtatactcttaaaaatgaaacataaataataaataaagacttatctctttatgttgtttaattatgctttggaaagatcatttttccttacagaagaatatgttgctagatagaartgttgtagtaattcttttttttttttttttgagacggagtctcgctctgtcgcccaggttggagtgcagtggcgcgatctcggctcactgcaagctccgcctcccgggttcacgccattctcctgcctcagcctcccgagtagctgggactgcaggcgcccaccaccacgtccggctaatttttgtatttttagtagagacggggtttcaccgtgttagccaggatggtctcgatctcctgacctcgtgatccacccgcttcggcctcccaaagtgctgggattacaggtgtgagccatcgcgcccggccgacatgtagtaattctaaaggatctgaatgtgttcgagaattttagaggttatacacaacaagtactttattatgtctactgtaacttatgactttcctttcccctattatagatatatcactgtcaatatcctattgtttcaatctttattactctaaaatagaattcaggcaaaggaaaaaagttcaagtaaatgaaaagatttatcaaagcntttaggtaatagttgggaggagtgaagggaaaaaatagatcaaataatatataggtgcttgtatttgaaaaaggtttgagtttaaatttctaatccatgagagaccaaaagacaaagaatctttwgtgatcaaaccgatagataactatttggaggggagagagagacagtgctggggaagactgcatagctcacaccgctttgtaggggctcactgggtactgttcgctgggattctcttggcaattagcccaagagagcagagcatggcagtgaggtgagagcaagcgtgaatacacactgatgctcctatgcgcagaatattcgcagtttataggtaaagatatgtgacttgcgaatattcctacacctacaaatgactattcccacactgtttttataggtcactgggctgtgttttgagctcaaatattgcctgcatcagaattcgtcgttatttcatagtgagtcatttgacaagtctttgttcttttcctggctgcaataattaagctaatgaaaattcttctcagtctcagacctgctgagaaaatttcccaggaatatgggcctttgaaaaaaaacggaactcttcccttgcttacttaaaaatagtattaaaaaatagtagtttacctcttttgacttgaaccaatgcttgttcaagactaaggatcttccacatcccacacagtcttctgatcctcttctagaattctaagccctttctacctaaattttctagaggcaaagtgcaggtttaggcaagggaaatagccctagagatgtctatggggtcccatgagtgaggaaatccagggcaaaatcaacttttggcctgagaggagccttttagcaaagacgtgattagaaatcttaaatccaacctatgtttcygtctaacagaaaagcttttgatccataatgagccactttgagggattttcaaagaggtattgctttttgaggtctcagagaaggaaaagtggagcttggagcctgcaaaaagcacactgaccctaaggagtaccggaaagttgctttctcagggagctatgagtgaatgttttggaaagctgcttgcctggcacaaaagaggaactctgaaaggctgacaaaaatgttccttatttcagcacgtatcaatttattactcatcagctcattagggttttacacggtagttggtttatgcaggccccagtgtgtaatgaacccgagaagtgaaaactcccccagaaccccaggctctcccaggacaggtaatttactttccagtgaatggtagtggactcatgtttttgtagttgcaatcgcaggtttgctctgattagtgagatgtcccagaactgtaaattagagtgttttatttttgcttcagtatatacattctgtatatgcatagctaagtggatatagaaatagatttcagtttgaaatttgaattacttaaccagtgtttatcaacagtgtacagtactgatgttgcacatggcatcagggcaaagtgctacaataaaacataggaaatctgtgatcttaaaatgcactttgccctgttcttgtagagccgtagattgttgctgtgaatgtcagtgctatttagggaggaactagagtgacaaagatacatcctggatttcttagagttgcctatgaccacacgtgcagtttgtctctgaagccagggagtgcctgattaaatacaggacccacccactgtgagaaaacactctggcatcccagctgccattcagaatgtaaaatccaggatatgacctgtcaagatgagcacttcagcatattgtggcaatgcagctgtcactgagatacataagtctccagagaaaagcattcaaactgtttccatggtggaatgaatacaaatgcacagcagctctagtcatatttgaatgtgagttttttcagcaggatggtccatattaaatatgcagatgtgtgcaagtgaccccagtacctcttctcatctctgattgctgagcattttctgaaggcataattttcttagttttcatgtgagaggggcagggaacatttgtaagccatacagagttaagatatccagttgtcctttttccttaatgaagacaaaattgttatagattatccatgacacatctgaaaaagagatgttttcacaacgtagatttaagttattttatatttatttcttgatattgaacttattctcttcaacactctgacaaatgtatagtgctagcaacatatttataatagaacttcaaaacttctgacttgtaccattagtgtcaggagaagcccagtgaatataattagtgattttataagtgtttttctaataaggaattaacgtgtatcaccctacaagtgtgcccaaataagtggtaacaaaaacttggggaggaaatttccttcctatgggatgtgtgtgtgtgtgtgtgtgtgtgtgtatayacacacacatatatctgaatagaaaactgaatatatatatttacatatgtgttatatacatttacagataggattcgatgtattaatgtattatatataattgtttatgtaaatataatatacaacatataactatacatgttatataactattctgaataggacactcatatagatatttactttattaattagaatgaaatgatatattacctaatgataccctgtaacaatttgtttcacttgtttttctcagaaactcttgattttaataattcattaayttaacaagtatattcaggcttgttatgtgaaaatgttaagtatataagtgtttccagtttkttcacgtataaatttagaacttgcatatccccaaatacctgaaagccataactgaactacaggataaccttcagaccttcacacttgtcacttcttcattgcactgtgatttttgttttcgtatttttttttggccccaagtacctatcatattccccagatggcttagccatcatcactggcagattatgaataatgttttacattgaacagatgtaagcaatttgtaatttttcccctttctgaaccagctttgttttgatgaatcaactggaaattgaaacttaagtagaacttctgtttgaaaaggagcaatgttttcccacattggcatatgtagtcagctcttaaatatagagaagaaacaacgaataggggaactggccagggtgtgtggcaagaaatactggaagatcattatttagcattgccatatagttccaatttctttattctatagaaccacataataataaaaaaaaaattaagttgctccaaaccaaccaaaagttcatcaggttgcctgtgtttctatccagtaagaacattcttcaaaagaactagaattctggaaatacagtaagagctggtgaaatgttaaaagagaaagaaatgagctatccccttgacaaggatgtgtttgctctgctgaattgtattttatgtaattatataaattataattgtattttttgaccctaatataggcaagtcaaattaagcattactgacaatttggtgttaggataagctctctacaagctacaaattaggtgaataatctctctacaagctacaggttaggtaaataatgacaaaaatatctacctaagacagaccttaattatatggctagaaaaggtacatttatttatatatcsatagcctattcataaataatatatattttccttacaatagccagtggccagacctaaaacgccacttaatgtccagagttcagttatggtcctgcactttcagagcctgtttctgacctgataattcttgcagtggaaagagcaatcaaactgagtatccttcgctttctttaaagtctatgagaacaatctaattggcagttggtctggaataaatcttaattattgaacacttgcaaatttgaaaacttcatatgctacagacagaatttgataacaaaaatgtcaactatcctaggcagacactaatgcacttcttatttctgtgctcattacttaatttcaacatcactgatataggaagtttaatgttaatatataaaatataattcagtagaatcatagaccatcctcaaagtttctttaacccttgcttccaaaaaataaataattaaataaataaataaatacacatgaaatctcatgtctatctttagcaatatttagaattgcaaaataaattaaataatatgatttgaacccaatcaaaacaactgtatttattatacttcttctacttatatcccactctaggaatctgtatgtttctctgacagtgaataatcattggttctaacaatctggtaaaatctcttatttttattacttttttagagatagtctcatactgtcacccaggctggagtgcagtggcatgataatagctcactgtaaccccaaactcctgggctcaagttatcctcccacctctgcctctccaataactaagactacaggtgtatgccactactgctggctatttttttttttttttgtcaagacagggtcttgctatgttgcccaggctggtctcacacctttggcctccaggaccctcccacctcaacctcccaaagtgatgggattgcaggcatgagccactgtgcctgacctaaggatcttattaactaaatcttttgtgtaggcagccattggaggaactcattaggtgtattttcttatttgattaaggaactgaatgggatggcttaccttgcccccctccaccttttttttcagatgctataatttaaaattccttagagatatataacagagttccttagttcctgagtttgctttgatacacaattgttagaccaaaaataaaaagcctttttttttcatgaatgttcaaaatgtaggatcctctggatatcccttaaagagttcccataaattttatggattcatagccttcttccaaagaaagaattaagatagcaactgagctatttcagttgtcttttagttaagtaaccccattagagatacaatgtgaggtttcttaatattttaaacttaatatttccccaatattttaatgcagtttatactctagcactctatagtttctttttgaacctctatataccctagattcttctcttgccttctgcactctacaggtattacatgcattttagcagtttatacatgaaatttgagtcatcatacaaaacaatattacatgaatgtactaaaatagaaacagatggtcaataatactgtacatttcttcgtaaaccaactcccacagattgcctttcttcagattttttgcccaagtagaaccaatcatcaaacaagtgattagagaggctttattatggaaatattcctcttgaacaataacaacaacaaaaagccatttcaatcacatttccattttaaagaaagttatatttcaccctctttaagtttattgttataaagtctgagttaattatctctatcaacttatattcttattcaaactgtcagtaaaaaagtttgtgactctcattcttgaatttctattacaccagttcgatagaaagaaaacaaattgtatggaataaatgtttgtcttaggcagtgcctctaaatttaagtgaatttcatgattgctatattgagttgaattgtatagtccacattcyagattgacaccacatgatcagttttcactgctttctaaaatgtatcaagtccaaaaaaagtaactattggagttttttgtttcttcatttgttttgttttaccggataattttaaattcctggttgtataattcaggcactagttcgttaaattataaacaaagataagagttaaatgaaactgaacttaaatttgttggttgagttgagtgttatatgagcaggtattactggaaaggagaccccatctagaccccaagagtgggttcttggatctcacgtaagaaagaattcacggcaagtccgtaaagggaaagaaagtttattaagaaagtaaaggaatataagaatggctacttcatagacagagcagccccaagggctgctggttgcccttttttatgtttatttcttgattatatgttaaacaaggggtggattattcataccttccctttttagaccatacagggtaacttcctgacatcaccatggcatttgtaaactgccatggcccttgtgggagtgtagcagtgagaatgaccagaggtcactctcatcaccgtcttggttttggtggggtttgtttgtttgtttgtttgtttgtttgtttgtttatgagacggagtctcactctgtctcccaggctggagtgcagtggcgccatctcagctcagtgcaacctctgcctcccgggttcacaccattctcccccctcagccccccgagtagctgggactacaggcgsccgccaccacgcccggctacttttttgtatttttagtagagacggggtttcaccgtgttagccaggatgatctcaatctcctgacctcgtgatccgcccgcctcggyctcccaaagtgctgggattacaggttttggtgagtttcgcctggtttctttattgcaaacggttttatcagcaaggtctttatgatctgtgtcttgtgttgactttctgtctcatcctgtgacttagaatgcctaatcgtctggaatgtagcccagcaggtctcagtcttattttacccagcgcctattcaagatggagttgctctgtttcaaatgcctctgacacatgtacataggtattgtgacctgattttgttaatgtgatttcttcgacataatatattaaatttcatttacatattgattcgtaatttacagtgaactattatttgtacgttatcattcaattcttttagcattcctaaagggaaaatgtttttacccaaatttagagatcaggaatctgaaacacagacattgcaaggactagccaaggcttagagcttacactctgagggctgactccattctaagtcctaggatttttcactgtaccgaagttgttcaataggaacattaacattattttagaaactttctctatattaatgttcttgattcggcaaccattttataaatgcagtttataaattaagtgattctgcctaaaatgtgttgaaggtatcaccgttgattcaaacaaaaagtaaagggaggaaaattagcgatggtttgaatagactgaaatttcaccaaatagagattgacatgtggagggaaaaaacaatccaggtatttattaatatttgactaatgaaaaatatttcatagcgtcttatagccctttaaagtttcagggctaaaagttgaaagtttttctctaattttgtggagcagaattaaaacagtggctttgtaatataattcaaaacccaaagcctgccaccttgtcattgtcttaacattatccttcatggaggttttcctcagctgggaagttccctttcttatatgctcatggaaagcccttgtctgagtgttcaatttatgccagggacaaggcaattgtctaaatgggcagttcctacagtatctgccctttatggcaggaataaaaatagagaataaagatttatatttgactaacccccaaatgctattagtttgatacttgctgggaatgcttttaggaaccacttagaatttgcttatggctatcttaattctattcatttgctgggatttgagaactctgatccttgactgatgtttagttagtgtactttgatagcaagaatrtrttacattattcaatggaatatagatcacatttgttgttccttacttttcttgaaattgattttagcacaactatctsggaggttaatgtaacctgatttattgatgtaaactgagcatatccatttgtaaagagtccagatcaagctaaaataagatcatcagaccattagaagagttgtttatattttattgtcatagtaaaattaacttttattgggaaactaacctcatataggctggggagtatgaaagtatattctctaagtgcctccttggactccttgttaatgtaaataaaaaatttgcatggataaacacctagatcattatcgtcttccctatctaacccatttttactgagcgttaggattacctacaccactaccaccccttgtattttaatgctttttttttctttgtaggactccatgtcctctgataaatgattgcactgtttcctttcaatcttagtaagaaaaatgtagtttccatggtttttgattttcaaaaagtaatctgatctcataagagcacttaaatgttaacctaatttaactccttcatcatgcttcagaagaccatccctttctatttttctagtatttcactttttgtatgtcaccacttcttcattctgcaagtttagattacgagtttcagttttttctcagaaggattaaacgtgaaggtcattaaaatagtaatggattaaaagaaaaggccattaacatctgtggtttgacatctgtttcatattttactctacctccaatttgccagctcaagattttaagcattctctttgacaactcccaaaagatattttactaaatgcagttataatccatctattatatgatgcttatttttaaaattcttcttcaccaaaatctagcccacatacgattatttaaatcactcatgtagtttgggagtcatctattttagttccattcaacaatctgacatggtaaataaagtctagagtattctctctggttatttttgtttaatttttctcagttttcagcaagattccattttcctgtgacttcattctcttacattagctttagctttgaaattgtaaggggtcattttatgactttcagattatcaagcattatcaaaacatcatgttttatataataaatatatacaattttatatgtcaattaaaatgaataagtaaatttgaaaaaatacattaattatgaatttgttaggagaaaagattatatgacccctagttacaagtgttacaggaaagtggaaattatattgtaagtttttcagtagggatgatcttaccaaatagctctataatgcgattgaagagaaatgctgcatgttatgtcagataaagtaggggtagttagtatctgccagcaagatgtaaagattagactactgctatagttggatgaactcccgtgttccttattgtgaattcatactgcttttgaccatatagaagtgaatgttttagacatagtgaaaccatattaagatcctcattttgttggtgggtaaactgggtcctaatatgtttaaatggtttgaccaagatcacatcattaacaaaggtaaatcaaggctgggcttcagtttttccaatactttcccactattgaatattgtaactcagggattagcaagtcatgagaatgctctgttttattaacactacaaatctctaaaataccagcaagaataaattaaataagcatgcattaagtacctactgtgtatccagcattgtgttgaatatgagttaaaaataaaaccatcatttatctcttctgtttctatttttattagataatgttaaacatttatattaatatgtaatgaagctatctttacaaagacagcttccttactccactttctctctttataaatggtttactccattttctctcttcacaaatggaataaacaactaatacctggaaatgtttctaagtaattttttaaattgattttcttgatcaaaactcatgaagctacaggccaggaggaatattttctstctcttctgcgtctgaagaatactggagcttgcttgtactggctggcaagatctcattgcaccatctcttcccaattcagtgttcactgatgtcaggttggtagcttgaaatcagccatgatggtaatatttacctttttttgagtgttcaatttatgccagggacaaggcaattgtctaaatgggtagttcctacagtatctgccctttatggcaggaataaaaatagagaataaagatttatatttgactaaccttcccaaatgctattagtatgatacttgctgggaatgcttttaggaaccacttagaatttccacagaaattgacaaatgctaatatatcattgaactgtctcccgacacccagtgtctgctttaaacattcaccaacgtaccaatgtacagcttgttggctgagtaaaactggataagctattttacttcttgagccacaactgcatcctctatgaagtagggatgataatatattctattgtgtatattataatattttatgaggatcatgtgaaagtggtttgaaactatatggagtaaaattattaatatcacaataatgagagttacgtattcaytaaatatgagacagttggcaaaatcaacataatatakgtasatctagaatttcttaacattgtatccatacttgatgtgacaatgtgcatagacagataaaaagaagaggggtgaaattcagagctaacagcaaagccttatttctctgatagacgtcagataacatacatcggtactgaatagaatttagtgatcattgagcataaagtagtatctccattcctttcttcatgccatgagtcctttatgcctctgatgaattaagcttataaagtttgataaagtattgtctgtatgtatactatgaagagcttctgtagaaaagattttctactttctttttctcagctacttgacacagacctctgaatacaaagggcacatagaaaaaaaaattaacaattgacctcttaaagttacagacttctgctttcattttaatgatacttcaaaataccttcagaggcatcatgcaattctgcatggaaattcataccctttggtacaatgtcattgcctttgtcatttgcaatgtggttaagtaaaatatatagtgaaagtacaaaattgtcttctgacttcaagcacttttgagagtgtacatgagaaaagtgggtcctttatactagtcctctcttatttacctttgaaaaaaattcccaaaaagcttcacacatagaaaaaaaaccactattgatactggcctgttaatcaccataacaccatacagatcattatttattttttccacctattaactccatgttggaaatgatcctaaggacttgctattccaagctgaatgttcttaagtagctaaagaatacaattttttaaagttaaaattaaaatagttatagccagatatatgtgagcttaaatcttggtcctgtcacctacaatttctgtgaccttcaactgattatttatcctttctttcccatcaccaccaagcctcagtgtcctcagctatgacataacatctactcacaggtttttggtgaggattaaatgaaaaagcaccacatatagagctctttacactgtctctggcccattatatactctcaataaattattcttattgctacctcttagtaatcgcttatctttttatccctaggtttactcttagcttgccaaatcatgttaaatatgtctgtctgtccctttatttacacacattagaagaagatttaagatctatcacttattgtctgtctggcatactataaggattacttcatggcagagtgaattattctcagcaagttcagtgctggaagttccacttttatttaagaaatttactatcatccctgctttatctgacaaacacaagccatctcataatcttaaaaggtatcatgaactgtaccaaaataatttcaaaacagaattaacttgtttgtgctttatgtaatatactgcagactagaatacaatgaaaggactattttaacagtagggaagaaaacagcagatattctatttcaatatgtccacggatgactgctttaagtttcatgttatgtagctgacacacatatactcctcataagaatgaatggacatattgacaaatgtgaatgatggaatctcaaaaaacatacatttatttattgctccatactgtgatttttgatgggaaaaataaggtcatcataaatggtctctattaggtttctggggtgactctagagttgagaatgtgcagatatgtcctgcaaagattactaatagaaagccaattatctggctgggcacggtggctcatgcctgtaatcctagcactttgggatgcagaggcaggtggatcacgagatcaggagtttgagaccagcctggccaacatggtgaaacccagtctctaccaaaaatmcaaaaaaaaaaaaaaaaaaaaaaaaaattagctgggtgttgtagtgggcgcctgtaatcccagctacttgggaggcttaagcaggagaatagtttcaacccsggaggcagagattgcagtgagccaagattgcgccattgcactccagcctgggtgacacagcgacagagcgagactctgtctcaaaaaaaaaaaaagaaaaaaagccaattattttataatatctcaaattactgcagactggaagaaccaaaagacatttttttaacccttgacatagacttccagtggaatgcagcacaaatctcagttactggaagacaaatatgagaggagaaatagaggagactccttaattaagaatacaaaggtatattttgttatacacttcatctcacattccagatagaagaatttctgggctcattaatggaaactttgcttataatataacattaaattacaactgttggcacagtgagattccatccttgatattcaaattcttctagaaattgtcacatttgatttttggaagaagaataacattttaagagaaaaaactatcattattaggttggtataaaattaattgcagtttttgtcattactttcaatagcaaaaactgcagttacttttgcaccaatgtaatacttctaaacttttagacttctttatttaaatataaacacaaaccaatattccttgtttgtcaatatattgaatgtgagctctccttagtatcaacgttgttaaatataacatttttgttcctaaaactgtggttgcttgaaataatcaggtattttgactcatcgggtgattattatctgcttttattatgagataaaatctaaaatattacaggatttaaaatcaataagcatttattaggtaccttcttttcttygcaatgtgttacaacctgaaggaaggaaagggaacaaaatggtgaggaggaaggagacaaggaataagagtgtttcacacaatttcacrgagagagaagatttgaaactgcaattgaattttatagaggaaaccccaaagccatagaattaaatgtttgtttcagaattaaggaaacatgtccattgaggttaaacgacgttaccacaattgtccagccaataagtagtcacagaaggttccaagagagaagtgggtttgtgagtgggactgaagaatgattgttttgggatatgttgagagccaagtagtattgcttattatatgtcaagctttatgttcttttacctttactgtctcttttacagcattacaacctttcttgttaaatattgttaactgggctccaaagaagtgaagcagctttctcaagtacttataaacatatcacagatacaaagctgtgtcttctgactataaatatagccttctatagcacactgatttggtgggtagagacattccaaattttcagtttgtttgaagtaagaaattgaactaatattttggagcaagagtatataagacacctcacttagccaaaacagagctttcatgctctgttttgtatgtgagagagtagtgagatctacagaggctatcaaatttattaaaaagttataaatgttctattaacacataaagtccagagtgaatgtttcatacaacagaagaaagtataataataaaacaaaagggaaggaaagaaggaagaaaggagggaaggaaggaaggaaggaaggaagaaaggaaggatgaaaggaaattaataatattaaaaataaaacataacctctctgatgaaaaataatttgtatatgtctatatgtgaatgtaacatatattaagatccaaatcagccagagaagcaaaaggatgttgcatgttatagcagtaattatccttatgtggatggattataggtaatgtttttcttagattttttttccttcaaattttctacaaggagcttacatggatttggtaactcaaaaaaatcaatttacatagaaagaaatacatgtatataaactaaattattgtttgaatgtaaaattttgctaaattttaaaccataacatgtacagttgggataaaagctggaacatgttatactgaaacagtgtgaatattccattattttatcaatgcattattttcaatttaatatttttcctaatgaggatgaaacacaagttaatattctatttttgatagactccataaaaatttgcagttttcaaatatcaaattgtgtataggtagatacattcaggtatggatttcaaaattgtagtctgggctctagcttttgatgctgataaatattatctaaccaattatgctgacagaattaaaaagaagatctattcttgtccttttcacatgtggaatttgttactggtttaataccgaattgcaataatttagattggcctatacaatttcaaacacaacattaggttgataataaacacaaaatacagtcttattgactgtatttgatcagttctgtgtttttaaatttttagaaagttattacttattgcctacttagtgacctgatttaaggtatttttcaacttatctgttacatattgatgccatttattaaggtgtatctttctgtgacactttttagaaatcaataggataagtggcatttattttgtgttgtttcttcaaaaatgtcctgaaatattgayggtatatttttctttgaaattattcaaactgttgcaaatcaaatatcacaaaatttatttttctgttagcatttctaaagctaaattaattcagtattttaactgcatagattaatttatttagaacaagaccacaaaaagtttttaaagtcactctactcattattttcaaataagatgctttgcaatcacagtttcattttcaagacacttcagtgatattctatttgtggtgtctcataagatgtcctgtatcaaaaaatttggagtgatttcacgtctctgacaccattttaaagccaataattttgctttcagcatttctaacgytgtagttacttatttgtattgcatgtagaaattgctttggtatttgtcaatgagcaaccatagttacatgaacctcgaggaaacctctccagaattaggaaatggaaagcatttgttgatagtaagaagtctggagtttcatacaagtaatatagcagcatttttctcactttagaaataattcagcatgaccttcatactgccaaattgttcctaatcattgactttgcctaatggaaatactgttttctttttgactgattttgaatttgcttggcttactttaaaaatttataaatagatagtttttttttaactaaccaactctatcacctaacctctgcaaccatacatattcacaatactttcacataaatcacattcacaatactttcttataatcattatttcatgttaaaaaacacttgttttctcagagcccagagagcttcaggccacatcatagtttcttcaaagccttcaaagaagtttgactatgctccttgcatagaatcactgtctatgttttcttcattgtgtttatagtgtatragttatggttttgctcattcagttactttgagttatgagaaaattcctagatgttcttctctgaaaatttcttataaaatcgtctttactgagaacagatgttctcaaaacaattgtgataataaagagttcataacacatttcatacagctcaaaatatttagcccatggccttcactaaatgagaaaaaatagaatatgtgtgaggccaatcctgattcagagaagggagaaaatgaaagacaaaatatagaattatgatggccaggtatattttccctgttttggatgtttccagtgaagtttgaaagtataaatttatttaaggaaatgaagtaacatatcactttaagtttttttcatactcagtactctagatgtattttatctcccctggaaagttttataaaagttttagagaaaaagaaaataatatgcgaaatctaaagcaagcttattaaatacagcaacaaacaggatctaacataatattccccttacgtttggatggcagagcacatatctctccaaatagaagacgatagaaaaacaaaataatttttaaacttattaagtttttgtgtttatcattggacaactttgaaagtaagagaaaaatccacactctttcagctgttttcaaaaaaggtcattgtccttaaggaaatgaatatgccaagaaatattggaagtctccttccttccagagatgtgagtttgcgtgcttttcacaccaatgtttgacagcagtgatggatttaaacattttgaaggactttattgcctataaagtacttatcagcattgaaatatattttatmtatctaacaaaatgttaaattgcataactggaaaactatcaattattctacaacttttttttattgttgttcttatgtgagtggaagtgaggcttctaatttgctttagtaaattgtgacttggaaaattggagctgaataaatcagttgatataacatagataaagcatttatttctttggatttttaattgcaatatcttacattttgaaaatctataggcatagtttcaaacttttttttctgggaggattacttaatctctacccaattaccatgacttctgcagttgtatttaatcctttttgagaaaattttactctgcatgttatataaatgtttgctattattcatttcaaaggtgagattctagagtaatattcacctacattccaggtcccttgggtatttatatgacctcaagaataagaaagaaaataaaggataaagaagaaataaaataaaagcatcaaattttctaaatgcttaaaaatatttcttcagtaattctttaaaatattattcataaagataccttttaagttttctgcattatatacttgctataggatatgctctatgtgtgtctaaattcttctcttcttgattttgttttttgtttttccagttactggctgaccaacaaagttcctatcaaaagacccagcacaggtcttctcatgtatacacttgccacaagattctgtgatgaaattcacctgtatggattctggcccttccctaaggatttaaatggaaaagcggtcaaatatcattattatgatgacttaaaatataggtacttttccaatgcaagccctcacagaatgccattagaattcaaaacattaaatgtgctacataatagaggagctctaaaactgacaacaggaaagtgtgtaaagcaataaagcacattttgaaacaaacaatatgcacttcttttctgaagatgcttccgaagatttgaaaataggatccaaaacacggctgggtttcagcatccaccaatgaactgaaaggtgaataaaggacgttcatgagaaatcgactaccagctgatraaatacctgcaaagtgctctaaaaattaaatattttgactttaagggtcctagtaagtgccacttccactaagaatacagtttgaatgtataatcagtagtgtttacaagatccaacagtgcactcatcattagttaacaaagcaaatatgttcatcactgtcaggctgcccacagcaacaccaagcatattagaagaggaaccccaggaacgcaactcagaccttgggaaattaaaccatccttgtcagcagaagccaagatggaagcagtttgagcaatgaaatccgtaagattaaacaactcaagtaaatgcttcagtcaggactctgagtctgatcatgaattttatgttttaatttatgtttttttttttgtcttctggaatctcttttggtttggatattgggatgcttagaaatcctttctgagatgcatatgagtgaggaaataaactttaagtaattatttttaaagttcttatactttttaaaagctatcacacaaagactttttttttttttttgtctcgctctgttgcccaggctggagtacagtggcgcgatctcagctcactgcaagctccgcctcccaagttcactccattctcctgcctcagcctccggagtagctgggactgcaggcgcctgccaccacgcctggctaattttttgtatttttagtggagacggattttcaccgtgttagccaggatggtctcaatctcctgacctcgtgatccacccgccttggcctcccaaagtgctgggattacaggcgtgagccaccgtgcctggccgacatttttaaaaaagttttattttgcacggctctaaacctccatgttattttccagtggtgtagaaggtaccagctaaagtgaaccactatgtaatattaggccattctaaaggaaagatgttccatgtcatcagagatggtaaaataggcmgggaaaaaaaaatctttggtaccaaagattacacttgtgtttctacacagcaaaccatttttctttcatgaaaataatatattattaacatgaatatattattttgctattaatgtgaaagttgtctctaaatattttttaattttcaaactcatactttattttcatttgaaatgtttttcacaccttttgcattacataataattttgtggaagcattttgccctttagaataaatattagattgatatagctgaaatgtgacttccagttctttgatattccccttgttattcaaatagaaatatggaaatgctttatatattactgttaaatttcttagtgcagaaataacattattaatagagtattgttttcaaaacagatgattaatttcaagaggtttaacagtgaaattgtgtcaatattttgcatttaaaatgaatttaattgaccgatattttctgtagttaaatttagtcacaatatcacatatgttcttcaagaaacacatgaaattattaataaagtaattaaaaaatttttaatgtataacagaattgaccaataggccagttttctggtaacttatgatagtagattgtttctttagaaactgggcagaagctctgcattctcacttgtactttgatttcttatttcttggtcaggcaatttgaggaaagaagaaatggcatggggaatatatatgttttgtttcttagggaaaacagtctgagaaatgaataaaaagcatgaagtacgtgtgtgtgtgtgtgtgtgtgttaccatggaaaaggatattcacagtagtacagttctcaatatttttaattagatgtcatatttttttaatatagtaaaaccttgggatatagaatattacatcttttgagaatgtatgtgtctctaagtaagtaaaatctaatgcgtataggagactgatagctaaaaatgaatggaacattaatgtacttttataattaaacctcttatctatcagaaattgtaagagaatagatacatgttttgaatgtaaagttgaaaagtctggtttactgaataaattgaaagtgatttataaaatctaaatttggactacttgcaaatgataagctattctagtagcctttagtttaaatccaacagaaatctagaagtcacaagcaaatatcttaaaggtaaaatccatctgggcactcatttaaagtatatcttaaaaaagcagcagcaaggtaccttgccatttttagcatattttcttcctttttcttttttcttttttttttttttttgagatggagtctcactctgtcacacaggctggaatgcagtgatgccatctcagctcactgcaacctccacctcctgggttcaagtgattctcgtgcctcagcctcccaagtagctggggttacaggcgcccaccaccacactcggctaattttgtgtttttagtagagacaaagtttcaccatgttggccaggctggtcttgaacttcctgacctcaggttatccacccacctcagcctcccaaagtgctgggattacaggtgtgagccaccgcagccggaccatttttagtatattttcagtaaatacatttaaacaatgttaaggccacagcacacatatctcagccattcattgttctgtgcattgatgtttatctcatagatgcattgagtagtgcctttttagctttttcacattactttgtcaccatatcctttgtgttctctaaatacattgcccacttccaaaaatgttcagcatgaaaaaaagggcttcagtgtcgattgagattgcttttgttcatctcagggatttcaatagtcaagaatgaattcagttaaaggtatttagggttcaaagaagacaaactgtacaagcccatttcattccttgttgtatacctttccatctgccctcccattttaactatctactgtggcctttttatggaaacagagcaagatcaatgaaggctaatggcaagaataagaaaaagagttgagatttaaccaatagcggagcataaaggatcatgacaaaatcaaattataaaagcatacttgaaataggtggagctttttcttttgaaaatatatattcacaattttaatattttaatttattttttactatttaaccctgtacttggcaatgctcaggcagctgattgtgaaatattcttgtcctttacagaacatggttgttattgtgctgttgacatgaatagaccatggaaacattttcatcattattattcagcctgtgctgtagttaatgttaagttgctgaaataaaaagtgagcaagtaatagattttcttggcaaatctaatgattcagcccacaggactgttgaaactactgcggaagtttttctatctgaaagaaggtgctgggcattcaaatgtgttcatgtattgtatatcatatgaattgtatatcaattactaatgggaatttctacatatatgcttacaaaagcaatttatttaagtaatgctaggggtagtgtacataccaattagttattcagctactatacagaaaaaggatgaacaaattaatttatttctaattgagccagttagacataatgcatataacgtgatatttggttcatgaaagagttgttttcatgtggttattgtagggagtatatataattgtggaaggggtatgggaagagttgtgtatagttagttgttatctctacaagtttgaaagttttcccatcaaacattatcaatataccaatgttttaaaaattgagtgagggttattatttgtatttgatgaaagaaaatccaaataaagcccacctagaaatagatattttattatatatgtgctatagatatacctatatagtacaaatagacatgtgtgatgcatatatacaatgttatatatgtgtatatgtctgtatacacactgagtctgtaatatgtatacactaaatttgtgttatgctaacatcttcagggtctgcactgtgaactcccctggagataagtaagtccactttagaataaagaagttcttttgagacttcagttactaacgtgctttaagaggtatctactttataactgaattctatgtcgttcatacgtagagttacagtaagggtctagtatgtccaaatcttaataataaagaagaaaagtaaaggcttcaagctagcaatgtattcgaattacagttttcagattgtggctccaggccttgtgtttctcatttaagtagcaccttttaataaaaaccgtttctttgtgtaggcaaaagcacaagtgtttcaaatgtaaatagcaggaaaaaaaaagagtttacagagatagcattgctgcasagaataattgctactgagtatttcttatagaatttgtggaactgaaagatgaggtttattctgtcaagttcaagttcattctgttcaacactgttttcttattgtttgtgtatagcaaccgggtattattgttttatcatttgtaaaattgtaaaataaattaatccctttttttcactgtttctcttatctcatatatccaagcccttggttatactttgtatgtcaatgttaggtgatcatttttaacaagctttggcttgtgctttgcttttccactccccttagccctagtggttggcaattaggcaaaccatttatttttaagtgtatacatgggaatatgaacaatgtcaaaaaccccatgaatattaggaaatccttaacgatattttgtgtagcacattctgtttgcggttgagggaataaagtatttcacaagtgacagtcatttatatccattttatactcccactgactaatgttagtgggttgttttagctacaatgacttcatacacactgcacattctatggcagatttttgatttagtattttgactgctatttgatccacttaatactgtttgtgatttgccttccagagatgattctgaaaaactacacgcttaaatcttcttccatggctttctataacttgcaagtctgttttcagactctgtattgatttctgcagaaatgtttaactgtagcattctgcaattttgaaacatttactggagaccaccaatgaagcactgacaataactaatacatatagatgttatttatatttgcataattacctttttttcaaagattcatatacaacaggttattcttagctactttggggggtataatcagatctcatcatgtggaactccatttttgatgttatggaagagctttcaggattgtaatacgagttttgatgcctgaagcaattttttaaaaggcagtatttacaaataatttattcctactgtcaaatattattttaaatgcttattatttaaaaataggtttaggtatggttttgcctgaaatggtggatagatttgctataatccttctctttactcttattattttatattacagcccagtccttttcaaaatgtattctgggaaacattgctgttcaacatgctctgcaaaggaatgatatgttctaacataattccacaatggtctcaggaattaataagaggtggtagcatattacaaaccgagaagtctccaaataaagaaaatgaattaaattttcctaaccaagaatgtcaaaatgtatcaaatttttgcatatttaatacttattttaagaaattccaaaatacactattttttacaaacattttcccagaattaaaaactgggcatacatttttatttgccttataattaattatctataatgttctacacaatttatgatatacagattgccttattcacacctttccttatattatatgctacaatttaaaatacaagtgtcaagatgaacattttgattacatacggcctttccatatggtttattaaaatgtacattcctctaagtttttgaacaagctttattagctattgattactgaatcaaatcaatccaattcaccagggcctataatgttagtgtgaaatggattgaatatgcactcatagtaacccaaaaatgtatcagccttttgaatctcccctttcataagttatcaagacttaaattgtccttactgtgggccaaacatagttttcaatactttatgtgtattaactgatttaatcctaataacaagtctatgaaatggattctgcaaatattataatttcatagataagattaagggagaggtcgtgtgatgtgctcaagattacacagctcaaaaatgagagaacaaggacttgaaaccactgacttcaatgtccacctccctagccatcacattttgatgctgccttttcttagctgccaagaagttctttgggaaacagtttgcaaaatagatgaccatttaatgagtacagatcaaaaatataggtaagtatatagaaataatatataatttagacttggggaaggtctaattactgattcctgcccccaaataggacaatcatttccaataataagaatatcttgatttccaggtcagtgtcttttccctggatggtgctggataaaaactgcaaattcttgcttctgactcttgttttattttttacatgcaagctggattacctttatgttcaaatctgactttatgtatcccagaatttattacattacagttattttaaagtctaaatatgaacttcctatgtaaacattttgattgaatttaaatgttttattcatctccattagcaactgtttacagaaatctcttaaagttgaacttctgcagatagctaaactcacctatttgatattgtttttgttttgttttgtttggttactaatttatctctcctcctggggataggagtaacttaatctccaaattaaggtggcagctcaattacttgctttataaactagcttcattgtgcatgatcccatgagaagaaaaaaaataatatcagatataagaataaaactagcagccgggcacggtggctcatgcctgtaatcccagcactttgggaggccgaggagggctaatcacaaagtcaggagattgagaccatcctggctaacacggtgaaaccccgtctctactaaaaaatacaaaaaaaaaaaaaaaaaatagccgggcatggtggcgggtgcctgtagtcccagttactcgggaggctgaggcaggagaatggcgtgaacccaggaggtggagcttgcagtgagccgagatcgcgccaccgcactccagcctgggcaacagagtga

SEQ ID NO: 95883 - DNA, 134698 bp, Homo sapiens
  misc_feature (1)...(134698): n = A,T,C or G
tagagtatgtgagtgcagctgctggtaagtgataaggtagtgagtgtctgaagaagtcttcttttgattgctccacttttctcagtcacgtaggaaagtcatcgcaagaattgagaactggagagattcgaggagagaaaacaaggtgtgaaagatccacataataaagtgagaaaattaatgtgataagaatgcaaakaagtttaatataattgctaagtagcaatatggccaacttgaagtttatggtcaaatgagacaaatcagtatggtttgatacttttctccagtcctgttcgcttttatgggtgcaggtgcagaacagaaagagagttggatttaatttagatggcagttttgctgagtacaaaaaaaaaaaaatgagaaacagacaggagagtcatgagtagaagcataacagttggccatagaatttaacctgggtaagagaagagggtcctcatcaaaggagtggagaacaggaaaatggtggtaggatcaatagattggcatttcttagggaatcaaatgatgattagagatccaggcttcttccacatcattattctttcatcattaagtatagctattgtcctcatgatctgagttttcacacttagctccaggcagcaggataaaagaagtaaaagtaggggaaaagaagtgtgactcttatctgcatttaaaggaggtttcccagaagttgtcacatgatactgcccccttgtatttcaatggccagaacctagtcacatggctactcctagcaataaagaggctgaaaaataaagtctttattccagaaaccagtaaaaaaataaaataaaataaaataacaggttctattaccacaaaaaaggggaggaaatatattagggcagacaattactatatttctttgattctaagatgtgcattttcccacagtttacctctctgaaatcaagacatataattagtactatgtcatggttcaattgctgcattgttttctttcttaatagtacagaaaataacggtgccttttacagttgatgacatgtattagaagaaagatgatagtacatatcttgccaaggcagagatactgaggggaagaacagattttcttggggcaagagaaaggggtgaaatagaattagtttggttttctatatgttaagtttgagaatgacctatgtgcagttgaaaatttagggctgaaactccagcgggtgatgaagtatgttctgaaatttatgtgggaaaactccttgagttcttaagaatgtgattatttgtacctcttgttttccaaaaataatttcaagtgacagatcttcactataggtagaaattctttcatttkttgccaaagcctcagctgcactgctagatgtcatgataattttataagatkataagrtattaagtttttcaaataaattagcagtgaaaaatgagatgtgataaaaaaattagtttgyagccaataaagtgatggtggaattttgtcatgtctatagtgattgtatgtgaaacttctgatagaaatgtctggttttaatttatttttttctggatgctttactaaagacccatgtgcaaggrgaaaaattaaaaacagacaactttggatccactgtaactttcacatgccatcagaaagtctaagataaatgtttcatttggcaatcatggatgaagtgcaagcaaaaagtaaagtcaatttacattttaatactcctatttgaaataataaaatggtatttggacataggcattttactacgcttactggtagaatgcatagtttggttgaagttataaaaaaatgcacacagcaaattatttctgttccactctcaggtctatatccttatttgaaatgtaagaaaaaaggaaatgaaagaggttattacatttttttaatgcaagcccagtaaaaggtaaatttatcttttccgatctcttgccagcaacgtggagctcctgtccccaatatctcaccaagttcttcaggaaatggcaactgatcaaagatgaaattttagaaaccaataagatctatagacccaagacagcaatcacattaatttgtatgagcttttcctaagcaaaatagcaaatagagatagcactgttttttttcatttttttgacattttaaaagttccagttactttcattcacttattccatacatcctttggaggctgctatatgtgagggactaggctagatactgggaaaatgataatcaaaatcagatatgatccttgtcttcagataacttactttacattgtagagaaagtgacaatgatagtgtattaaaactgagacatgagaggtgctacgaagaaggaagatgtgatgctaggagagtctacagaaagagctgacataaagggaagtcagagaagtatttttcatgtaagagcataggaaaagatgtttttggatgcagaatatctaactaatggaggtttaaacaattaagtcatttattacctcatgtaacaggaagtttggaggtattttcatcaggtttggtttaaaagtcggttcaggattggctcaatgatgtcaactaagccctaggctcttttcctctctctattcctccaccccttcttgttagctaagctcttatgcttgtcccttctagttcagaagatgccacagttctaggcattatgtcctcatataactgcattcagacgcaggaaaagaggtatttcttcttgtatgtcttttttttttttttttttcagaagtcttttttctcaaaagggatttcagatcctgttggctttggacatgttcatgtgctagctgcaggagctaatgggaaagccaatatacagcaactttagtctctatcataggagtcaggctctgtcagcaaggatggcggaggtgaaaaatgcctgtaagacgtagtttctactatggggagtgactctgaaggatgtgactcacagctgtgatctgaagggcaaggaggatgactagagaagaggcaaagaagtggactctagtagttaacaacttctggggcagcacattgaaataacaaaatggcacttggacctagacattctattaagcttaatggtacagcctgtggtataggtgaaatagtataaataaatgaacataccaagttatttctgttccattctaacacctatatcctgtatataaggtcagaaaggacctcaggaatgggcagctgagggaatccagcagaaagtgaagggaatcaaagattccactagggttctggcaatgctgatgttggattatgggctgtacaaaagacaaagagactagagaccgggggctttcctggggaattcagatccatggaagttggggactagaataggtgttaggtggagaggttgagctttggttggtagggccagtaacagggctataggaagttgctcttatgaacactgggacacatcccattattccttcacatagaaaatctttattaaaattcacccagacaccaaagccacccttgggcttaaaatttctctctgaaatagagaacccagaaatagccacacacaagtatggccaactgatattttgacaaaggtgcaaaagggactccatggaagaaggataaacttttcaataagtagtgctagagcaattggatagccacaagcaaaaacctgaacctaaacctcacacctattaatggaaaacttaactcacaaaaattacatagacttaaatgtaaaaggcaaaactaaaacaacctttgaaagaaaacaagataaaatctttaggatacaggattagagaatagttctcagacatgacagcaaaagcacaatccataaatttaaaaaatgaataaactggacttcatcaaaattaaaaatatttgttctgtggcagatcttgtcaagagaatgaaaatacaaactacagattgaagaaaatatttgtgaatcatgcatctgacaaaagacacatctaatatatgaagaactctcaaaatgtacaggtaaaaaaccaaataatgctaattagaaaatgggcaaaagacataagacatttaactgaatggaatatacagatggcagataaaaacatgaaaagatattcaacattattagccaccaggggaataaatgtaaaactgtgatgaggtattactgcacatttattatttactttagctcagctaaaacaaaaatagcaataatagaaaatgctggtgaggatatggagaaactggatctctcatacattgctggaggaaatgtaaaatgttacagttactctggaaaacagtttttaatttctttaaaaaatgacacatacatgtatcacatgacctggcaattgcactcctgggcatttatctcagagaaatgaagatttttgtccacataaaaacctgtattcaattgtttgcagcagttttatttgtaatggccccaaatgggaaacaatcaaaatgttctgcaataggtgaatggttaaacaaattgtggtacatccatgtcatggaatattactcagcaataaaaaaggaatgaactattgataaacacaacaacttggatgggtctcaagtgcattatgccaagtgaaagaagccaatcttagaaggtcatgtactgcatgagtccattcatataacatctcaaaatgtcaaaattataaaaacagaaacagagatcactagggttaggagggcaggtgttaccaaaaaggttagcactagggagatctttgtgagggtggaatagttctgtatcttgatcatggtggtggttacacaaaatatgtagtagaatgacataggactacacaaatactttatatcaatgccagtttcctggctttgatactgtactagagttatacgagatgtaatcactgggggaaacaggtacacaagacatctgtactatctttgcaacttcatgtgaatctataactatttcaaaatgaaaagtttgaaagaaaattttctctgaggcatctctcccttgccttccttcatcttgtgcatttctttccctgagtatgactttttctctttctttctccctttcccttatgtactgggttttcctttaacggtccataatgccaaactatgtcattccccatcctcctattgttcctatttatttaatgaaggttatgttttcatgtgcttaattttaaaagcaggaaagtactaactctttaaacaaatttcttaaaaaacaaaacccaaaactaacctgctttttattttatataattcagttagtcattattctttaaggtcggaagtccacaatacaaacatgtttccaacacttgtattggaagataatttttgttttatatgcatggagcattaatatcattcttcatgtctatggattatgaacacacacacattcaggatttactggggaaacagtgacatcaaatattatgttctattgattcttcatataaatctacatgtcaaaaaataatcctttgccagatcacgtatccagatttttcgtttggaaaatacgaacattactactacagaatatcaaactgaatacagccctgtccwgagggcttgcaaagtgaatctggcaatactttggaaaagtactactgcaggttctcaaggacccaaagagctctccagcttttccagtgggttcagccccaaatatcctaatttcttcaataaattacgagttgcaggtgtttaaatatgcaagtatattttggtcttttcgttatcattgtaaaacaccagtcctaacaagcagtaaagattacactttatggtggtaatatttacagttaatgcacttctgcatttcttcccgcacatttttcttcttacttatttaaactaagcgtttcccctctttttttaagccccagtattaaaaagaaaataaaatcccaaagaatttcgcaacattgcgattgcactggcttgagaacgaaggaagttagtcccttgcggtgatccgtcctttcatcctggcgtttgcctgcagcaagatggcggcggtstcaatgtcagtggtactgaggcagacgttgtrgcggagaagggcagtggctgtagctgccctttccgtttccagggttccgaccaggtaatagaattttcacacttttcttcaagcttcttgggtccctccatttttgcggagtctctgctggctgagttccggaggaggcctcggggaaggcgtcctctgttgacccttttctcgggagangtcgggcggactagggactgtctgctatcaatgggcgttggccaggcgagtgagggcgtgagtgcgaggccggggaggagnacctgtggttttctggaagctttcgtattcggcttgtcgctgagggagagggtccgtggaggttttgcctccggagctgcaagctgaaccttagccctcagagaaggggaggagtctcactgatttctgtttccactttctgcatcccttccatttgtcacctgtttgcccaccactccagtccttacagaagggttaaatcactgtatcccttccatggttttaagtggttttaatttggtttctgcataggaagattgtttattcatcagtctgcttgggaggaaaacttgtttggaattcagtgttagtaaaaatatcactgctagtaatattggaaggtaatttttaaaaggctggtggtaatgcctggaggttttctagggattttgttaaagcctcacaataattcagggattgaattgagttgttgagggctctttgcgtccttgagaacctaaagtagtacttttccaaagtattgtcagattcagttgtcagttgattgagttgttactgtttttccttgaagcatttttgtgatgatttttttttttttggctgtattaaccttccattttctatttttcagaatttcctggagttttttaaattatagtactaatgctatacgtacatacacacacatattagaacaaagattggaaagactggatggagagatttgaagggggtaggaggtggatgcaagtggttaaaagttgaaaggaaggtctagtagaatgctaattgatttagtgttaaatataaatggaatgcagagaattaggatgagttaattcggaagaatttttaaggatgagttttattaaggtttaaatatagtgggtgttgggtgggaaagaagagagtgtcccgtagggtccgtggcttatgaaaaggcttgaaagcattagttaaacgattactaaatacatagaatagagtcactcaaaagtaagggtgctaagattggggaaaggcaaatgatgtttgtaattaagtgttccatatatggaaagtatttttcctttttctttctctttttttttttgagatacattctcactctgacgcccaggctgtagtgcaatggcgtgatcttggttcactgcaacctccgcctcccgggttcaagcagttctcctgccgcagcctcctgactagctgggattacaggcgcgcaccaccacacctggctaatttttgtatttttagtagaggcggggtttcaccatgttggtcaggctgggttaagtatttttctaaggtaaaatacttcactggttaacttagagttaatatagcggtgaccaagattagcccttcctcccgtacagattatagggattaattgtcattcccagataataatgtactcatggtagccccagaactgaaaacaagtttgaagggaccactggtttatggctaatcaaaacatggctgtaattttaagtcaaagccattttgtcagcaattatagtaattgaagttgagattagatttttgaaactctgatgataattgttactacatatccaaacttaagagtttttgcctgcaaatgtaagagatttgaaaataaatcatttaatcttgaaaaaaaatcttaatgccagggaagacgttttttaaatacaaattaacacatttatttgttttctgtgccacatttttaccctaagagcttgtcatgttcatcctaatttgagggaaatttatagaccctctcccttacatattgtttgttcttcatccttaagcattctttttccattatgatttgatagtaatgaggatctgaaaaaggtgagtagaaagaaccaattaatgggaaaatctacatctaaaattcattttattgtaatgcttagaaaaacatttgcaaatcatgtaacatttcagatcatttgaatagaatatgggaagtggaatcagtaaggtaaggagtggagtagggaactgaaggaaaggaagggccgggcgcggtggctcacacctgtaatcccagcactttgggaggccgaggcgggcagatcacaaggtcaggagatcgagaccatcctggccaacacggtgaaaccccgtctctactaaaaatacaaaaaattagccaggcgtggcagcgtgcgcctgtagtcccagctactcaggaggctgaggcaggaggatggcgtgaacccgggaggcagagcttgcagtgagtcaagatcgcgccactgcactccagcctgggcaacagagccagactgtgtctcaaaaaaacaaaaaaaaaaaaaaaaaagaaaaggaaggatgctgttagctgctacattaacatattaattcaattatagtatatcatcagtgaaaagcaaaacaaagaatgcaacaacacatacacacaagagagaaaaaatctagtaatgtgggtgattgagctgatctagttacttactgagcttgtgctgtagtgttggtctcagtttccatgtgcttctcatttccctgtaccgaatgtgaggaggcaaaaaaaggggttaaattgtctacattttttttttttttggagatgtagtttcgctcttgtcacccattctagagtgcagtggcacaatctcagttcactgcaacctctgcctcccgggttcaagcgattctcccgccccagcctccagagtagctgggattacaggtgcccaccacctcgcccagctaatttttttatttttagtagagatggagtttcaccgtgttagccaggctggtctcaaactcctacccacaggtgatccacccgccccggcctcccaaagtgctgggatgacaggcgggagccaccgcgcccatccctaagttgtctacatttatccttactttccctgactttcctaagagattttccagggtaaatttaactattctaaatgcatttatcagccagatgaaatggcactctatttcaaaatagctatacttaagatatttgatgcagtgatgtttttattcacttatttaagtgtgttcatgtatacttatctcaccttagtatttactaggtcttgtgttttcctcaaacaagtccttagggtgttaaatcacccagagggttttaattaatgactggtggggactgagtgtttgggacctgtttgtgaggtctcttttatgccctgatctgtggctttattctgttgctgtgtttggttcttcagcattatataagctagcatgaaattgagtcttcaattcgatggggaattgaatttgaaccctccaaatagtaagcagtccttaaggttgacaagaattctgtttgttaacaccttgctgggaaataggctaagctcaaatttaggacacttaagaccaataggttcacttctacttcagataaactaaataaattcctctcctaggggcagctatttttgctatctttgtaacacatccaagccaaagtttgagagcttgaaagatttctaatatgttttctgataggtttatttgttttgtttcttttcctctttccaaatgcccatacttagttttcatcagtagcagacatcttcgttgaatttttgttaggaaaataattattatattttgagacagagtctcattctgttgctcaggctggagtgcagtggcgcaatcttggctcatgcaacctccaccctctgggctcaggtgatcctcctgccttagtcttcacaggcagctgggactgtaggtgtgcttgccaccacgcccagctaatttttgtattttcagtacagacggggtttcacactggtcttgaacacctgaccccaagtgatccgtgtgccttggcctcccaaagtgttaggattacaggcatgagccaccgtatccagccggaaaattaaatattttaatatgtaatgtcggcatatagtaagccttccctagataartggtaattttattattggtttgaatggcctgaatgtttttcatttctttaatcttggttgtaagtattgtgatagattgtgttattgtttaaagtattcactaccactgtctgcaacaggattacatatccaaaaaccactggccaaatgacttgctttatccagtgaaatgttagtggaaatgatataccatgtcaaacaggagctttgagagctctcctgtgttttgtcatattccttttccctctgatgtgaggtaggtgtactccaggtggggtctgctgttttagcccacatcttggattgtagactacatagtgcaaagcagaaactgattcttattgcaagattttataaaatataaattgagtgaaaaataaacctttgctgtaagccacaaaggtgtttggattggttacctcagcataacaacctatgctgactctattttatatacactcatatttgcaagtgagcaggttttagcacatggaccgatatatcagcagtgaggtcgcaagctttttgaggacacaaccacatttttgtttatttgtgtgtacttcatggcatctagtgtaatggcttgcatgtagcaggtaaatgcttatcttacagatgaataaatacatatttagagatgagcgattgtgaggaaaagcagggagcattacgcagtgtttcttttaataccctcatcagtgatagccaggtaggcactaacctttataaatatgaagataaactatctacaacacatattctaattatttgcagtggtctgagtgtaggatattcacctagaactctgttaacttttggattgaagttgtcttatgaatagattttgtattcatacactttgacaagtgttcagacacttcttttgtattcaaatttaaaaatgcaagaggaaatgaatgtttgggaaagggtacccttggaacatgagaacttttttggagtaagagtaactmtgcgaagttttaaaaagtcagtaatacggccgggtgcggtggctcacgcctgtaatcccagcattttgggaggccaaggcgggtggatcatgaggtcaggagttcgagaccagcctggccaacatggtgaaaccccgtctccactaaaaaatacaataattagccgggtgcggtggcgggtgcctgtaatcccagctactcgggaggccgaggcaggagaatcgcttgaacctgggaggcggaggttgcagtgagccgagatcgcaccactgcactctagcctgggtgacagggcaagactccaaaaaaaagttaataatacacggaacttaagggagaaagatggagcaacttggttcctgtataatacttgctagaagagatctgtttggggtgaggtatacatagaatttagtcagaatacatattgtctgtactgaatacaaacaatttcaaatggaagagcttctaaaacatgtcccttggtagaagttgagaatcgtttattccaagcaaaattaattccaagtagcatttgtttttaatttactctgtatcagctactgtgccaaggatttcacctgtattatctcatgtgtttcccacagtaatcctatcaactcaggtgttgttatcctcatttttcagatgaggaaacaggtacagaagtgaaattactkaagtttacattgccaggaaatgtaattgtctcttggtatccatgaaagattggttccaggactcctcaaggacaccaaaatccacggatgctcaagtccttgatttaagatggtgtagtatttccatataacttctgtacatcctcctatatactttaaatcatctctggattacttatgatacctaatacaatgtaaattctctgtaaataactgttatcctgtattctttaggaaataatgaaaagaaaaaagactgtacatgataagtacagatgcagtttttcctcccccaccgccaagtatttttttttttttttttgaggtggagtcttgctttgttgcccaggctgaaatgcagtggcgtgatctcggctcactgtgaactctgcctcccaggttcaagcaattctcctgcctcagcctcccgagtagctgggattacaggcgygcaccaccacgcctggataatttctttgtattttaattagagacggggtttcaccatgttggtcaggctggtctcaaactcctgacctcgtgatccacctgcctcgacctcccaaagtgctggaattacaggygtgagccactgagcccagcaccccttaatattttaaatctgaggttggttgaattatgatgtggaacccacagatgcagagggttgactgtagtctgatatagcagtctaaatgaatatgttcacttttgcagtgaggaatattatgtctggtaataatcagttcaaaccctaatgtcctctctgttttttctgccttttagccaagtgtcttctttatttgagagaccatggaatgctcttatctttactgttgctgcatggttccatttgtacagtgagagttaccaaatgcacaattagttgtttacttttttaagctaatgattttttcccctaaattttgtaattatttttggtaagggacttttcataggtgacttattatacttttttacgctcttaaaaaatatatataacaagatatactggacattttttttttctgttttcttactgattccagtgattaggaaaaacggttgtattgtgttgtctttaaaaacgattcagtgtctgctatgctttctgagttctcgtgtctgctttttaatagtgttatattcttccttgactggtctgcttccctttagcagttttagcacccctttttcatttattatggatttgaatgtcaagcaactaaacctattagaattttgtataaaacaaagtatgcttaatgaaattctgatgatggcagaagtttactttttatgattaaagacttgagctcttttaaggttaacgaataattatatttaatatatgagctcttgtgacttttcttttctagcttgtagaagtccatagatcctgatggaacctttttgaacctgaattatgcagtgaccacattcttcataacaactttcatctaaacatatgaataatttaataaactattataaattttttcttttaataacagagcaattcagaattcttgtttcaagttctattttgttgtctgttactaagtattttggtaggtaaatatgactttaggttctttagaactagttagttgctcaaaggtaaccttttcttcttgtctgtactcactagacttaatttttcttttatgggctcattctccagttcactggtttttaaacccttgtgcatcaaaattatctgytgggtgcctaaaaaattcagatgccttgccccccagtctatattggttcagtaagtttaggttgaggcttagctctatggtgattctaatgggaagctagggctgaaaacggattaaaaaaaaagtttccatattatatcttgtaagacttaggaaatatatttttccttgggagagagttcagggagatttccagaaacaaaaattcttccatttttgcatatttttctattctaaattaagttttatgcttttcacccatgcacrtaagaggtattttcttggggaaagtttccttagagggaaaaaaggcattttgataattttggagaaagcaggccatattactctctctctagagactcttattcttccttttggaagggctcaggtttaatatagcacagctgttgaactctgcccttcaaaattttaagaaagtgttttatcctttaaaatggaaaaggcttttttaggaaggtggtctttcactggatgtagttctctaagaaagtttcatgcttctctactcttttgtgtttgaatcgtttcaaatgttgagagaactgtctctgggagtaaaatctggctgcttttgcaatatattttctgtattcttaaacaaagctatatgaagagtttatttctttgtgttttctaggactcaaaaatatgttttttcctttattcagccacytcacacwtaagtaaatggtccttgaatagggcttactggacaaaagattctgttctagatgactgttcagcaagccatatgcttctcctaaaaatgtcagtctgtcttgatgagctttaaagtgaatacagatgttttggctcttttgaggactaccactctttgtatggaaagagtacttctttttcaagtgatctcttcaatatacttacaggaatttgcatgaaatttatgacttttgccttttaagtctaataagattagacttagacatgtgtaatttgaatttaattttaatattcgtagtacaaatgagatttggggaataaaatacatttcataatatggctttttgttcagattttgtattcaaccttttaaaaaatgtgaaagtgctttgtaatatttacttttgtgcaataaaaagtgatattttggcaggcaaggttacctttttagatgttcagtgtcttctatctttgtaggttaactctggagttatagttcatagatttatgtaatatttaagttggaagaaaactctagaatcattaagtccaaccctttatttaatgcaagaatccctagaacttcctgcttcttgattatctagttgttgaggaagtttggtgactttctgataaccccagaaaacacactatacgtttagacttactggtaagtgatgtttttctttgaaactgtatagaacaagtttaaccccgtatacacttgtcagcccttcagataattgaagacatttgtcatcactcattcttccttcaagtctgtgctccaggcttagcacgtccagtttgtttactctttattaatgatcaaatttcctgacgctttactacctcttggtaccccttaggatgttttccattttgtcagtgttgatctttgaactatgtactgtacttttatttaaatgagattatcagagatgatagtttcatgagctgagattgaattaaggaaaaaagttgactctaggttggatttattttatattatttttaaaattataaagaaaaattaactgttttccttttggtgtatacttcttagagttttaacacatgtatgggttatgtgtaaccaccaccataatcctagtacagaatacagtgtaatatgcagataactgttttactgtattgtttcagggtgcagaataccaaaagacttcattaccccaagactccctcatgttatccttccctgaccgctgtaatccctgtccacagttatcttttttcatctttatagttttacagttttgagactgtaatataaatgtagtcatatataaccttttgagattgtctttttttattcagcctgatgcctttgaacttcatataagtttcatgtatcgacagtttgttcctttttactgctaagtagtattccgttatgtggaggtaccacagtttatccatttacctattgaaggacatatgaattatttcaggtttttggcagtgtaaatagagcttctgtacaggattttatgtgaattatgattttgtttctctagagtaaatacctgggtagaagattcctgggtcatagctaagtgtatgtttaattttataagaaactctcagaccgttttccagagtggttgtaccattttgcttttcaccagcaccatatgaaagttttagttgttttgcatccttgttaacatttgtattgtatttttttttctttttttttttttttttgagacagagtcttgctctgtcacccaggctggagtgcagtggcacgatcttggctcactgcaagctccgcctcccaggttcaagtgattgtcctgcctcagcctcctgagtagctggtattacaggtgcatgccaccatgcccggctaatttttgtatttttagtagagacggagtttcaccatgttggtcaggctagtctcgaactcctgaccttaggtgatctgcctgcctcggcctcccaaagcgctggaattacaggcatgagccacggcgcccggctgtgttttttattttagccattctagtaggtgtttaatggtatttcattacggatttttattttggaatggctttatttagctataatttatatattataaaatttactcatataaagtatacaatttgactggttttcatatattcccagaattgtacaaccaaaaccacaattttagaacatttccatcactcaaactctgtacccattagcagtcgcttctcccccagtcctagataacgactaaccttctttttgtttctacagatttgcctattctggacattttatacaaatgcagtcatataatatatggtcttttgtgacaggcttgtttcagttagcataatgttttcaaggtttatccaagttgtagcatgtaccagtactttattcctttttattgaagaatagtattctattgtatggacaaaccacattttatttttgagggacatctggattgtttctaccttttggctacatgaatagtgttctgtggacattcagatacaagattttatgtcaacatatgtttttattgttttgggtatatacctcggagtagaattgcaggataatgtaataactctatatttagccttttgagtaactgtcagactgttttccaaagtggctgcactattttacattcccaccagcagtgaatgagggttccagtgtctttgtatcctctccaactttgttattatctatctttttgaagttataactatcctagtgagtataaggtggtacctcattctggttttgacttgtacttctatgatggctaactcattgtggttttaatatgcatttctctaatggcaaatgatgttgaactttggtgaagtatctgtttatgtcttttgcccatttttaatcatgttattttcttattgttcagcttttatagttcctaaaatattctggatacaaattctttgtcatgtatgggaaaaaatatatctctctaggttcatggttgagccccctacaactaaagacagatgaagaagagaaaagcatacacatgtatttaatataaatttgtgtaacatgggagctttcataaggagataaatatccaaagaaacagttaaacttgtatatttttatgcttaggtttggtgaagagtagatagggagaaatatgatagaacaaaggggatttggtatatggtaataagctgggggaaacagcaaagccagtttgttctgattcgtctctgactgaccatttgtcttcagagataacaatgttcctttctttctgatatagggaagacacctctcacatgagagttttatagggaaggttagataatcctagattttataacctacttcagagaagaagggatgggggaagaaggtcaaaggtaccttcctacttcggccgtttttcagtattacaaggtggcacattttggggtagcatgtcctgaactctaccaatcagatgtgtaattttcaaatattttcttctaatctgtagtttttctttttcattctttaacattatctttcacaaagtaaaagttttaaattttgatgaagttagtttactagtatttttccttttaatgattgtgctttcgttgttgagctctttgcctaaccccaggctgtgaagatttttttctgtattgtcttcttgaagttttttttttttttggcggagtctcgccctgttgcccaggctggagtgcagtggcgcaatcttggcttactgcaacctctgcctcctgggttcaagtggattctcctgcctcagcctcccaagtagctgggattacaggcatgtgccaccatgcctggctaagtttttgtatctttagtagagacggggtttcaccatgttggccaggctggtctcgaactcccgacctcgtgatccacctgccttggcctcccaaagtgctgggattagaggcgtgagctaccgtgcctggcctttgttgttttttgttttttttttttgtttttttttttttttaagagaccaggtcttgctctgttactcaggctatagggtagtggtatgataatggcttactgcagccttgacttcccggactctagcgattctttcccacctcagcctcctgagtagccaagactacaggtgcataccaccatgcctcgctaatttttatattttttttgtagacatgggtgtctccctgtgttgcccaggctggtcttgaactcctgggttcaagcagtcctcctgcctaggctccccaaagtactgggattacaggtgtgagccactgcacctggcccatccttctttttgaaaattgtagctattttagttcccttccatcatttagaatcagctcttttataactatgaaatcctgctagggttttgattgtattgcattaaatctatagattaatttgggaaaagttgacatttctgctgtgttgaatctttcaatccataaacatggtatgtctctttatttatttatctaatcagtgttgtagttttgagcgtgcagatcctgtatatgtttcgttagatttatgcctaactatctcaatttgggggagctgtggtaaagagcattgcttttaaaattttcttttctttattttttattttttagagacagggccttgctctgtcatccaggctggagtgcagtggtgcaatcatagctcactacatccctgagctcctgggcttaagcagtcctcccacctcagcctcccaggcagctgcgactataggcatgtaccactaagcttgactaattttcttattttatttttttgtagagacaggttgctatattgcccatgcttgtctcaaactcctgacctcaggtgatcctccttcytcggcctcccagaatgctaggattatagacatgagttattgcatccagcctaaattttattttgaaattgtatattgctgtatatagaagtgtgattgatttttgtggttgactttgtatcctgtgaccttgccacatttatttgttacataaagttatataagttttttgtagattctttgggctttctaagaaaataatcatgcagtccgtgaatagggaaattttgtttcttcctttccaatcactaggtcttttatttctttttcatttccaggaggatgttaagaatggtaacagcagacattcttttcatttaccaatcttaagggaaagcattcagtttttcacctttacgtataatgttagctaaaggttttttgtagaaataccctttattagattgaggaggttcccttctgcttctgctttgctaacagttttcatcaagaatggatgtgtctaatgccttttatgcatcaattggtgtagtcttgtttttcttctttagactgttaatgtggtagattgattttcaaatattgaatcagcttgcattctcaataaaccccacttagttgtggtgttgaattcttttcgtatactggcatatttggtttcctaatactttgttgaagatttttacatctgtgtttatgaagaatactgatctgtagtttgtttcttttttattttggtactgtgtttagatttggtatcagggtaatgctggactcataaaatgagctgggaaatttttcatcatcttttcttttgaattgctttagtttcatgctacaaattwagatatgttgtattttcatttggttcaaaatattttatttcccttgagacttcctttttgatctgtaaattatttagaggtgttttgtttaatttccatgtatttggatgctttcttttttttgttatttattttttgtttatattatattcggagaacccaattccctggggtttcctttatcaatgtccatccagaaaattgtggctatcattaagttgcactgtagttgcacctaaatcagggactaagggactagaggacagagagagaaaaaaacagaaaagcaatgggtgttggccccaccttttcagaaccacagctccagcggacttagaagaagaaccctccttcagatttttggctcccgcacatttccattgttgccaccgcatgtggctataggattgcctatggctgattcatggtgtatgagagaaaagagaagaaaatggggattttctatcatttctctgagcacttgtttcttttcttgctccttgaggccgagtgcttctggagaattgctcatttcatgtttccagccgcatttaagttcaggctggggacattcaagggaaaagctatttcagactcactgctagttcagtggtcctttgagttctgatgatcttccctgatctgcctgctatttccttttcagagccttcaaacagctgctccatgcatcctttccagatttcatggttgcattcagtgggagatacagggtacagtgtgcttgctacatcttactcaggacaagcccatcctaggatggattatttttaaagctaaacgctaacatttcttgcatcttagcacatctgaatggatttaaaggatctaaaatgactcaaaatattctttatatgatcagattcttttttttttttttttttttttttgcagacagagtcttgctctgtcgcctaggctggagtgcagtggcatgatctcggctcactgcaacctctgcctcctgggttaaatcgattcatgtgcctcagcctcccgagtagctggaattgcaggtgtgcaccaccatgtctggctaatttttgtatttttgtagagatgggggtttcaccatgatggccaggctggtttcaaactcctggcctgaagtgatctgcctgcctctgtctcccaaagtgctgggattacaggtgttagctaccacacctggcctaaatgatcagattcttaaccagttgattctcaactgtggtgggagaaagggaggaattcacataccataatcttggaaatggcataaagaaagggtttcacaatacatgtacttgtggttgaaaatcatgacttttatttaaagatgttgcccatgtaagtgatgcagaggcaggaaaatacattgaatcactggtttagaccatcaaacaataaatcttctttgagagggtgtagaggtcagagatctatttagagtaaatgatggaagttttggtgacttttctctagaaatagatacagtcatatgtataaaatcagagtgggggattaatggatcccaggctttgtagcccttccatagatagtattaggtcttatacagtgttttgtttatactcgtgttcaagttcttgtgttaaacctttctcacaagttacagaaacctaaaatctcagatggctggcttaggcaagaagagagaattggtttacattaccaagcaatggaaagggtaagggtgcacctagctagtctcagggacctaagctagaaagccaccaggttctttttctagtttgtctctgtctgtctctgaatgacagctactatttcagattgtttttttcccatgtggtagatactataactgatagaaatttcttcaggtttatatctccatagctttattaccagggagggactgaaaatccctttctctgataccaagtttaaaaatcctggagaaatacttgatttgagtcagattaaacacactaagggtttacaaaaaatactcaatgtttgtaattcttcttatactgctgtatcgtaygaatatagatcataggaaccttgagagtgagatgtaataaaagctgggacctcctagtcaaaaatttagaacaggaatattttgtgtagtgttatcttcgggaaacaaagtttgtgtatgttttatgggttaaactatcttttttcctaatgaattctgagactttgctaatgtttgttcacccattcaacaaatatttgtatttcttttctagcttcaaaggctgcatttctacagacttgagtaggatgtatgctcttggaacatctgttttgaggattagcagtgttcaagcaaaggccaaatactcatttctcggggtttgtgtagggcttcaccttagtttgtcttctccttgagtagagtctgagacaaagacataagcctaggtggtttatttgagagcttgcctgggaagtaggagtgagaagcctggggagtgagagagggaacaaaaaagtatgatgttgcgattgttgctgtgagcagtagagaaacctcctgagcagtgtgtagaatgctacccagtattacccatttgaaaggtggaaggcttgaccatttatccataagttctcattcccttttgattaaaggtgttaactcttttgtgctttaagctatacttgtgcttctgaagatgttgaggcgtaatgggctcacttgaggtgggatgctagaggataatgggagtatgaattcctgcagctgtggctgaaatgacacatgggccaagggagtgtgacatgagcttcaaaggtgtctgttacaggaccttataactaaagagtctctatagtctgctatttttttttttttggtcctagtaaggggtctaatatctattgtttattgtgcacttaggcattgaggtaattactttagatatattgtttcatctcactaaagtaaacatctaattttagatggtctcttggtgattatattatagtttgatattttcccagggttgtaaaagaattcacccgtattggaatttgttttactcacctgttctgaagggtatgccaaaggatttggaaattgaggtcttccaactcacttaactataaataataatctcatgggaagagatagtttcttctatataatgttatgtttaaggaattcatgatagcagaatattcctatgctatgtgccagggtagttgacccgggattgtgtataacatcccagctaacaaagatcaacctacagttttctttgaatttggtatcctagatgatctaattctccagatgagcatrtattttctcttcagtgatactgcctaaaagacttagggtagttaagagaattttcttcaacagctgccttttagtcttgctcctgtcccactttcatctctgactgattatcattgtgatagtcttgtcttccattttattaatgtctcagcataccattttagttcatagttcktactagaatggatacaacatgcatctgagtttatttaacaaattttagattcttctttccttagttgagactttaaacattgttattctgttgctgatgaagtccatggtttatgtctgtcttagttactgcttgtaagtggccccttattaaggctcaagtttttattttggttctagatttagttttttggcttaaagttcaaattcttattgtggccaactcccttaatagactcttaccagtgtccttgaccctagctttgggaaagactactttctagaaattttctgttggctcaygatattagccatgctgtcaggctgtattcttacccttctcatacttgagctactctattggacccgtcatgtcagtctagcagactagttaagaacacacattttagagtcaactctacctacatttgagttcctggtctgatacttgctaactgtgctttccttgtttctgtgtcctgttccgtaaaatggacataatacttcctgttttgtaaagtatataaaatgcatagtacagtgctcggcatatgctataagtgcctgaaaaattataaaaagaacattatcatcactgtcctgctcctcctcgatgtcatcatcattattctttcttttgtagcttcttttcctttttgcttctttctccctctctacttttcttactttcttttttctttcttttggtaaatcttaactagattccaatttcgtgttttggtttatcagaacatcctggatttcgtcttacttatttgcagtattttatgcataaatatataatagaattttgtgcacctggctttttccaaattgtgacctcccgtgcactccccaacccacaacaatctatctttagcatctaccattccactgaaatagctttgatcaaggtcagcagtgaccctgttgctaattgaatattttcttctcagtccttatcttacgtgacctttaccatccaaagagatgactgtctcattcttgaaagattcttcccttgacttctgttttggctttactccgtctcagttttctttcagaatacattatcttttgcccattcattgaactatcattgtttcttaagagtttgatttatacctttttacgctttctaaaatgtttcaaattagataatattttatatacacatgaatatatgtatcatatatatgttaggaaccataatagccaaatgaattcttgtgaacccaccatccaatttacacactagacaattaccagtacctttatttttgtatattctctgtgaggctgaataatgacacagccacccaccaaatatgttcatgtcctaatccccagaacctgagaatgttaccttatatggcaaaagggactttgcatgcctgggcaacatagcaagaccctgtctccaaaaaagtaaaatcaaataaaaatttagctaggtgtggtgtcatgtgcctgtagtcccagctacttggaaggctgaaacaggaggattgcttgagcctagaagttcgaggcttcagtgagctatgattgcgccactgcaccccagcctgggtgacagagcaagaccccatctctttaaaataaaagggaggggaggctttgcagatgtgataaagttgaggatcttgagatgggaagattaccctggtgggcctgatgtaatcacaatggtccttataagaaggatgcaggtggagtcagagaaatagtgtagagttggaagcagagattggagtgatgtgactacatgtcaaagaatgccaacagtctctaaaagctagaagaaacaagaaacaaattgtcccctggagcctccagaagagtccattcctgctgacacattgatattagccctgtgagactgatttccaacttctgacttctagawctataagagaataaatgtaataaatgtgtgttgtttcaatccacaaatttcgtagtaatttgttactgcaactataggaaactaatatactctccctgtgtctcattatccaccatgacttcatttaccatctatttacactaaagcctaaatgtaaatgatttatttacatcatatgtacttttcacttaagaaattcaacacatatacgtggcaactacaaatgggtagagaattttttaaaaacagttaaaaatgcaagttaatactcttatttttctacttaatgatcatttaggactcaactaaagaaacggtagtttgttctagtgctagacgactggcttattaagagatagtatgtgagtctcctttggaggggatcttcctaaattagaatttccaaagatgatttttgctatttgcagttgttgcctaacactgactttaggacctgctcttcatgaaagatgtgattctgtatcttttccatgaattctaggtgcatagatctaaccaagacatcctcatcttggattttgcacaggcgtctcaaatccagcatacctgaaacaatgttacgatgatgacttcctccacaacttcgcttatttattttctttctttctttctctctctttctttctttctctttcgtccttcctttcctttcctttcctttccttttccttttccctttcctttcctttccttcctttctctttctttctttctttctctctctctttctttctctttctctctttctttccctttcttttcttttcttctttcttttctttccttctttctttcttttggagtttcgctcttgttacccaggctggagtgcaatggcacagtcttggctcacggcaacctctgcctcctgggttcaagcgattctcctgccccagcctcccaagtagctgggattacaggcatgtgccaccgtgcccggctaattttgtagttttaatagagatrgggtttctccatgttggtctggctggtcttgagctcccaacctcaggtgatctgcttgccttggcctcccaaagtgctaggattacaggcgtgagctactgtgcctggccacacttattttcctttttagtaattgtcaccaacacccagccagttgtctaagccagaaacctgtgtattattcttctctccttcctctcttaggcttcatatcagctagtcattaaattctagtattcattttcctaactctgaatcaatttccatctttgctacagctattgctatcatcctgcctcctaactgatctccctctcatcagtctcagtttgttctccatgttgggtacatgttgcaaaagtctaaacttcccagcatgccacagagtccttcatattccctgctcatttcattcttgggcattcatactttcatcagtcccctcctgacccaatctccagctgtacataaactctatattttagtatttctcaactgcttgcaacccctaaatgttttctctcttttctgtaattaaggctctgtctgcctagactatttcttctgctttcctgtctgtgccttctctgccccggcctacccccaacaccctttgcctatttaagtcctgtttatccttcaggtggcagtttaaccatcattttctttgaggagcattatctgaactcacaagtttagattaagtacttatctgtgaagtcttagagctccctctcttacctcatcatgtttttggaaactgctactttaagggaaacaatgtataaacaaaaccagtttaaccgtaggctaattgatataaaacaagagttaaaaaagatcatcacatttctaaataaaggcccaagcatttctaatattaatcattaaaataaatgtgagctagggctgggcgtggtggctcacgcctgtaatcccagcactttgggaggccgaggcaggtggatcatgaggtcaggagattgagaccatcctggctaacacggtgaaaccctgtctctactaaaaatacaaaaaattagccgggcgtggtgttgggtgcctgtagtcccagctacttgggaggctgaggcaggagaatggtgtgaacccaggaggcggagcttgcagtgagccgagatcgcgccactgcactccagcctgagcaacagagtgagactctgtctcaaaataaaataaaataaaataaaataaaatwaaattaaattaaaataaaaataaatagctatatacacatttaagaaagatgaataaaaacaagtaagatacttatccatttatttcagttcagggtcaagagtggccagagccagccctgatagctcagagcacaggacaggaaccagccctggacaggatgccatcacattgcagggcacactcaaacatacccacactcactcagacsgtggccatgtatacatgccagttcagctcacatgtacatccttcggatgtgggaggaaactggagtacacagagaaaacccatgtgaacatgaggagaatgtgcaaactccacacagatagtatccctggccgggaattaatttcgttttttctttttcatcaacatataacaaaatgaccttgaacaagctgatattattcaaagacctgctgtacttactatgcttcatcatgatggcctgtttacttgtctgtgtttctctttagacttaagttcttcaagatcaagaactgtttcttcacctgtttgtttttacaggctaacacagtacttagcgtgtaatagatacttcatataatagatacttggtaaacatctgtggactcatttgattatggaatcatatagaaatttaaaactaatgcacagcagcatctccataagcagtatagcatatattttttttgagtcggagtctcgctctgtcacccaggttgaagtacagtggcacgatctcggctcactgcaagctctgcctctcagcctcctgagtagctgggagtacaggcgcccgccaccacgcctggctaattttttgtatttttagtagagatgggctttcactgtgttagccaggatggtctcgatttcctgacctcatgatccgcccgcctcggcctcccaaagtgctgggattgcaggtgtgagccactgcacccggccttatatatttttttcttatgaaataactgtttgggttttcaatatagccatcatggacaatgtcagagattaccaaaaaatgatgacttttatagctttatgatgcttcttatttcatactattgaataatactattgcaaactttatcttacggcaatatttactaaaatgtatatgtggagtcctgtcagaaagacagctttccatgtgatttgggttattagaactctaaagttgttcatgaaggaatggacatgtattgcaaatctaagtaacttccaattgtaatttttttccgtaataaatagctgtatagctattatgtgattttagaatagcagaatgcttgatatgcagtataaacccagactttggaaatagaagattatacattctgtttatagtctgcattaaatataccgcatgattttatttggctaaatttgttcaattctatgtattttggaaataaaagcaactcaaaaataggaatcaactagagtttaagggatttttaaatattataggtattgttacattttattatttcaattactgggagttgatgggtggcaagataagacgcactggtgggagtaaatttgggaagatgaagaattcatggcttttcaaccataatttaagctactggttatgtggtactatacctacatttaaaagttgccaagtgttgccaaccgtggttgccaagactgtactgcacataataagtacaaaatgtgtgaaagaattcaagtaatatgttaaatgtttaattcccttttcaatcttgggrtgttggatgatcaatgaaaacagaagtatctggcaggtacaggcaacattgttaagaaagsttttccttacagtcctgctgcatctcacttacacctcccactccccaatgcacagttatttctccatgcatagaaaagtacttcatatgtacctttttcatagaaattaccatttgcattcaaactattggcattgcgattattgtttatatgtctgccttctcgcaataaactataaaatcttgaaagcaagttattattgggtttagcattgtgcgtaagacataatagatatttcatagtagatgtttggtgaattgagaataggaattagaatcttggtatacattcttaaatatatatggttgacrgagttcaactgagcttcttttttttttgagatggagtttcggccttatcacccaggctggagtgcaatggcgcgatctcagctcactgmaacctctgcctcctgggttcaagtgattcttctgcctcagcctcccgagtaggtgccaccatgcccggctaatttttgtatttttagtagagacggggttacaccttgttggccaggctggtcttgaactcccgacctcaggtgatccacctgcctctgcctcccaaagtgctgggattacaggcgtgagccaccatgcctggcctcaaatgagtttttaaacataggtatgccaatttgtagttaataagtattaactcttgttagatcttttaaacttctcttcagagtattttattgcctggatatttaccagcataactaaaaatgttttctgtttttgtttttgttttgagatagtctcactctgtcgcccaaggtggagtgctgtggcgggatctcagctcactgcatcctctgcctcctgggttcaagtgattcctgtgcctcagcctcccaagtagctgggattacaggtgtacgccaccacacccagctagtttttctatttttagtagagatggggtttcaccatgttggccaggctggtctcagactgctgacctcaagtgatctacccacctcagaaaagtgttgggatttcagacgtgggccatagtgcctgaccaaaaatgttttaaagttaaaaaatcttaggtgaatattttaaaattatgggatattatgaaaagtcagttgaagaagtactggttttgtgtctcgttttcttgttgattaggttggttctgtgattaaaagcaaattgcctatataattctgatagtacttattaaaaagtcattgacttaggcttttaggtaactattcataatttataagggaagccagtgggagttttaattacttgttctgttctagtagtctgcagttttattgactcgatttggatgaatcttacaataaataattgttgagtttttcctaaacagtatgagggcctgtaaaagcataaattgaataacaagcagactattttcttcattaagctaaccacaatgaaaatttttgtgccgggcttggtggctcacgcctgtaatcccagcactttgggaggctgaggtgggcggatcacctgaggtcaggagttcgagaccagcctcaacatggagaaaccccttctctactaaaaatacgaaattagccgggcgtggtggtacttgcctgtaatcccagctacttggaaggctgaggcaggagaattacttgaacctgggaggcggaggttgcggtgagccgagatcgcgccattgcactccagtgtgggcaacaagagcgtaactccgtctcaaraaaaaaaaaaagaaaatttttgtgtgtatgtgtgtgtatacacctgtgcctgtgtgtattgtaatttatttttatgtgtccttttgtgcttttatgcatatgttttttgttatgttacatttctgagttgatagttttttcttttgttttgaaactattggaattttctattaattttaagcaaattgccaagtacattaaatttgtagacatccatttttaaaattgtattttaaaatggcattgctttgctgactagtatagaatattttcagtttttcttttattaacaaataatatcggccaggtgcagtggctcacgtctgtaatcccagcactttcggaggccgaggcaggtggatcacttgaggtcaggagttccagaccagcctgactaacacggcgaaaccccatctctactaaaaatacaaaaattagctgggtgtggtggcaggtgcctgtaatcctagctactcaggaggctgaggcaggagaatcgtatgaacctgggagatggaagttgcagtgagccgagatcacgccattgtacttaagcctgggcgacaagagtgaaacttcatctcaaaaaaaaaaaaaaaacaaaccaaaacaaaaaactcaaataatctctagttatagtaacttattactaaatctttccttgatttgaatctgatttcagaaaaatgattgcattagaacaggccataggtagcaaactttactgtagttgttcaggaaaatgaattgtttagttagttagttttgtttgtttatttatttattttgagacggagtctcactctgtcgcccaggctggagtgcagtggcgcaatcttggctcactgcaagctccgcctcccaggttcatgccattctcctgtctcagcctcttgagtagctgggactacttgcrtccaccaccatgcctggctaattttttgtattttttagtagagacggggtttcaccgtgttagccaggatggtcttgatctcctgacctcgtgatccgcctgccttggcctcctaaagtgctggaattacaggcgtgagccaccgtgcccagcctgtttcttccttttttttgagatggagttgtactcttgtcactgaggcaggagtgcattggcacaatatcggctcactgcaacttccacttcccgggttcaaatgattcttctgcttcagcctcccgagtagctgggattacaggcatgtgccgccatgcctggctaattttttttgttttagtggagacggggtttcaccatgttggccaggctggtttcgaacttcttacctcaagtgatctgcctgcctcggcgtctcaaagtgctgggattacaggcgtgaaccattgcacccggccgagttatatatatataaaataaattctaagagtctccttctctatcccatctgctcatttaccactgcttaccccactcccaaaaaatcattattagtttcttatgcttggagtccgtttatgcatatttaagaaaatatattattcttgcccatttttccacagaggaggcatactaattgtaattttcatgttgctttcaattttttaactttccattaaaattttcacacatgcagaaaagtggagtgctgtgaatctataaacctaccacctagatttaacatggttagtggttagtattttgctggttttgcttattttgcatatatatgtatataaatgagcaaaaggcatatatytgagtatgtatagattagcaacagacaaacacatatattgatctaagccatctgaaactcaattataaatatcatggtattccatccctaaatacttttttttttttttgagacagcgtctcgctctgtctcacaggctggagcatgtggtgctatcatggctcactgcatcctccgccctctggtctcatgtgatactccacacctcaacctcccaagtagctggaaccacaggcatgtgccaccatgcccagctaatttttgtgttttttggtagagacgggatttcaccatgttgcccaggctggtcttgaactcttgggctcaagggatccaccggcctcagtctcccaaagaactgggattacaggtgtgacaccatgcctggcaatacttcasttttttaaggtaaattaccactcagtcaatgaaggatttcaaccaaaagagtcacatgattgggtataataattacttgtttaggttgaaggtgcctttgaggaagagaagactagaggcagagaggccaattattaataagtgattgttgtacaggcatgctttggagatactgcaggtttggttccagaccaccactagattgtgcaaataccatggtaaagcgagtcacacaaattttttggtttcccagtgataaaagttatttttccaccacactgtagactgttaagtgtgcagtagcattatgtctaaaaaacagtgtacgtaccctaatttaaaaattctttactgctcagctcaagaatgttaacgatcatctgagccttcagtggggttctctttcctctcttgccttcctatgaattggtcctgcttgtgactagagggaaagaagtgaacatttgtttctccgcacaccagctccttcatgccaattacttaactagttatttaattctaccagtaattatttgcggtattattatccttatttttgcagatgaggaaattgaagtgcagagttgtgaaataatttgttcaagatcatattgctcttaagtggcagatctggaattttcacgagtctgactgactgtgaagttactacatgactgttatccagtttgtttcatgaagtgaaaaatatatgaatgctggtaatttttgttttcttctgcatgtattcattattcttaatgatgtgatcatcagccttttaaaaaacaatatgtcagtccatttgcaaatacaccactcttaggcactttatttttgaattgaagtatrcaacttgtaccaactagctttccctttgatgtaatattgccaaacaatgraatatcatgtcttatattrtcaccatattttatttttgaattcactttttattttatttttaatatattttttatacaaatgtaatctcagtggttttagggctgatacagagaagttttagaccaaaagattcctawaccgaagcaaaaagtgacaagttggaacacttgaaagtgaagagaaaatgcatagccatcttaaaaaaaaaaattaggaggtgatctgtccaagatgacacagtagcattagagcagttgtgaagcagatcatctaatggctttttgaccccttctgaccttcaaaagcgtaagaaaataaattattctgcccttaaagaccaaaacgtaggtttttaagagcaacatcttgattcatttgaaaatagtaaactctcaagctgtaacactcccaacctcagtcaatgtaaaacagacatcatacaatttaaattctcgtatggtagtccctagagaagcacttgaatrgagaattgcttatcaaactgtgtcagtcaggatcctaaaccccaaaatacctgtagcttaaaataacagagatttatttcttgttcatgttgcatttcccttgtgggacagtcaggaatgctactccgtgtatcctcacttgggaactcagactaactactgttggttactgggatgtaggaaaagaggcagttaggcattgacttctaaagctactgctggataatgtcatttccccttatacttcactaatttaggtaagttacgttcctacacctaaccaagaagtggcaatgggagtgtagtctcaaaatacgattagaaggagaatatgattaatactgagtgtcaccttgattggattgaaggatgcaaagtattgatcctgggtgtgtctgtgagggtgttgccaaaggagattaacatttgagtcagtgggctgggaaaggcagacccacccgtaatctgggtgggcaccatctaatcagctgccagtgtggctagactgtaaagcaggctgaaaaacatggaaagactagactggcctagcctcccagccatacatctttctcccgtggtggatgcttcctgcccttgaacatcagactccaagttcttcatttttgggactcgggttggctttccttgctcctcaacttgcagatggcttattgtgggaccttgtgatggtgtgagttaatacttaataaactcccttgttagttgtgtccctctagagaaccctgactaatacagagaagaactggaatatgggtgcccagctggaatgactaacaagccttttgaggaatatagagaattacgcatgattgattggtagaatgatttttttaaaaaaatgccaaatagctttgaagtaatcctgttttgattgaattaagggtcttgttgctgaaaggtgaactaggcagtttagccagaaatgtccagtagaggagtaaactggttaattggacatccttttccttgtgttttgtctgttacattttcataagcatatttaagatttgctcttatgtgcttgcttataacataaatctattaataaagattcacagttatcaactatttttatgtagaacatgttggataatgatgctatgcaaagtctaaaaaatcaagaggttaataattggtaggacatataacaaaaactatctcatattttgtgttacataggcaagcactagtagtttttaaaaagtatataatttgggaaaatttgttccatgaggcagtacaaatgaataatcatattgaagttcaacagcttaattctggacttctgaaattttccaaggagatgagtgattaatagatacaaacatactatttttatgtacatatgtgaagagactgtctctaggcagttataaatcttcttcatctttgacaaacttttgcatatgtgtctttattggtgttgtaaaccagggattatctgtttcttcacaaggcatgctctttttaaaatattgtcgtggtttatacatactatgaaatttaccattttaactatttttaagtatatttcattggcattaagtacattcacattgttgtgcaaccattaccatcatatatctccagaactttttcatcttctaaaactgaagtctgtacccattacacagtaattctctattcttctctctcataagcccctggcaactaccattttactttctgtttctgtgagtttgactactttagataccccatataaatagaatcatatactattcttttgtgattggcttatttcacttatcacaatgtcttcatggttcttccatggtgtagcatatatcataatctgcttccatttaaggcaaaataatattcaattgtatgtatataccacattttgtttacacattcatctgccagtggacagtagggttgcttctgtcttttggctgctgtgaataatgctgctataatcatgagtgtacagatatctgttctagtccctgctttagtttgtctgaatataaatcccaaagtgaagctgctggattatatggtaattttattttaaatattttgaggaatcacactactgttttctgtaatggctgtgtcattttacattcccaccagcagtgagcaagtgttccattttcttcacatccttgccagtacttgctactttttgtttgttttttttgggggggggggggtgataataactatcgtaataaatatgaagtggtatcttatggttttctttttcatttccctagcactcttttgcatgtttttgtgtggacatatgatttcagctcatttgggtaaatacctaggagcacagttgctgatcctatgttaaaactatgttttagctttgtagaaaactgccagactgtcttccaaattggctgtaccatttcgcattcccaccagcgatgaatgagacttctgttctcttcatcctttctcaaatttggtgtggtattttggattttagccattctaataggtgtgtagcactgtcattttaatttataatttcctaatgacatatgatattgagcactttttcatatacttatttatcatctgtatatcttctttggtgaggtgtctgtttagatcttttgcccacttttcagttgggttgtttgttttcttattgatgagttttgttgttgttgttgttttgagacgggatctcgctctgttgcccaggctggagtgcagtgtggcgcaatcttggctcactgtaacctctgcctcccaggttcaggtgattcacctgccacagcctcttgagtagctggaattacaggcacgtgccaccatgcctggcgaattttttgtatttttagtagagatgagggggtgtggcagatttcaccatgttggccaggctggtcttgacctcctgacctcaagtgatccgcccgcctcggcctcccaaagtgctgggattacaggtgtgagccgctgcgcccggcattgttgagttttaagagttctttgtttattgtagataaagtttcttaatcagatatatagtttgcagatattttctcctagcatgtggcttgtcttttcattcttttaatattaatagtatctttcacagagctaaagctgttaatttcaatgaagtccaacttatttatttttcatggatcatttttttggcattgtatctgaaaactcagtaccaaacccaaggtcacctagattttctcttacattatctttgagaaatttgattgttttgcttcctacatttaggttcatgagccattttcagttaatttctgtgaaaggtgtaatgtcactgtgtagattaagtttttgcatgtggatgtctggttgtaccagcatcatttattgaagagactgtcattattggattgcccttgtttctttctgagagatcagttgactatatttgaatagtctatttctgttccattcatctatttattttatagctaataccacagtccttattactatagctgtgcagtgtgtagtaagtcttaaagtcgggtaataacagttttctgacttcattcttcagtattgcattggctattttgagtcttttgtctttccatatgaattttagaatcatrcctggaataaatcctgcttggtcatggtatataaatcttttcatgcattgttgaatttagtgctaatatctgttaagaatttttgcatctatatttataagagaattagtctatagttttcctttcctgtaatgcctttatctagttttgatgtttgggtaatgctggtcccatagaatgaggtactacatgcttctatttcctagaagagattgtagagatttagtgtcatttcttccttaaatatttggtagaattcaccaggaaacatctggacgttatggtttctttttttggaaggttattattgattcattatctttaatagatataggcctgtcccgattattgctccttgtgagagttttagtaattcctgtttttcaaataattagcccatttcatttaagttatcaaatttgtgagcttagagttgttcataatatttccctgtttttttaatgtccgtgggatcaggagtgatgatacctgtttcattttatatattagggctttgtctctctctctctctctctctcatctgtctgtttctcttttttgttaacctgactaaaggtttatcagttttaatgctcttttcaaagaacagcttttggttttgtttatttttctttaccaatttcctatttacaatttcattgatgtttactataattttttttatcttcttcttgccttaggtttatgttgccctttttttttttctagtttcctgtggtggaagcttagattattgaatttagttagacctttcttcttttctaatatatgcattcagagctataagtttttctctaagcactgtttttggtgcatcccacaaattttgaacattgtattttcattttcatttagttcaaaatattttaaaatttttcttgagacttttttgacccatgagttatttagaagtgtattgtttgatctccragtaattggagattttctagttttctgttactgatttctagtttaattccattgctgactgagagcttgcattgtgtggtttctattcttttaaattagttaaggtatgttttatgtcccagaatgtggcccatcttggtgaatgtttcacttgagtttgagcagaatgtgtcttttgccattgttagataaagcagttgacagatgccagttatatccagttaattgattgtgctgtttacttcaaccatattcttaactgatactctgtctactggctctgtcaattactattcgaagaatgttgaagtgtcccacaataataatgcatttctccttgtagtttcatcagtgtttgcatagcatattttgacattttcttgttaggtacatacacactaacgattgttacatcttgttggagaactgacccctttrtcactatcaccttcttcatccctgataatttttcttgttctggagtcccgtttgtctgagattaatttagctgtggaagcaagatttgactagtgttaacatgctatgtctttttccatccctttacttttagtctgtgtctttataattaaaaatgggtttcttttcagtaatatgtagttgtgtcttattttttaatctactccgataactctcttttaattggtatatttagactatttgcatttaaagtgattattgatatcattaatattaatgtctattgtgctcatatcatctgcattccctctccctttttggaatgatttttcttttgctttgtaagcattttttatgtatcctacagattagtcttttatctactatatgttttacttattatctctgatttttcctttatatgaatttgttgttcagaaattatttttcattcctagtttgtggatattttgccttaatttggaagactttaaccactcaaaagttattaaaacaaacctcttttatacattatctcagtatttttttacacacagatacacatacattgcatttgtatatacgtatgtctgtgtttgtgtgtgtgtgtgtgtgtgtgtgtgtgtatatgcgttgatttttaaatccatctggaattctttggtacatgatgtaattcttttagaaagggattcagacattatgcttccatgaaaggatggccagttgtctcaatattatttattgaatagcccaccttttcaccactgatttaaaattgtatttttattatgtaataaatctacagatctgcatagtctgcttttgtactctgatctgtactatttgtttaatgtatatgtctgtgcctgggcatatacaggtattttaattacagtagtctgttacctggcaaggaaatcttactttattattgtttttcaaatttccttggttattttttatgaattttttcttctcatgagactcacctaattttataaaaattctattaggatttgtattactattgtatttaatttataagttaataattgacatctttgtggtaaattgtttccagttattaataacacatgtcaaaggatagcaacacagtttcttccattaaggcattccaagccagtagacgtattcttctgtggccaaggtagctcaatgatttgaccttcttaaatgtgaacatttcatatgttccttgtgttttgtaatataattactgtcatcaccatgacatctttatttcttattcttctctcatgtatatttattttgataacctgttgctataaatgtagatacatttmtttctcctttacattttccrtcacaccctccggtttctttgttagcatcctccagtatcttgcccacattctcctacttattactcttcaattccatttcagagtctgttacgtgaacataattacccttatccctcttgcacaaatctttctttaatctgttggatgactctgaaaggattagtttcagtttggggcttgagctgtgtccagacacacaactgctattagttcctaccatagttctacctggttcagaagaatgagaaaaataatccttactttttcctcctctatgagcaggaggtgcttactttttactgatttgaccagctgaacattttaagataatattcagtactgtagatgaagattagaaattactgcaaaaactttaagtgagaataaaagaatttrtggtgttctaaagagattttaaacaaattatcttcactattgttttctctaatttaaacaaagcatttgtgggttcttttcttttacttttactcagtctgtctttccagaatgttaaaatggtcccttaggctgggctcggtgtctcacatctgttatcccagtgctttgggaggccgaggcaggaggattgcttgagcccaagagttcaagaccagcctaggcaacatggtgaaaccatatccctataaaaaaaaaacaaaaaattagccgagtgggatggtgtgtgcctctagttccagctactcaggaggctgaggtgggaggatcgcttgagccaaggaggtcgtggttgcagtgagccatgattgtgccactgtactccagcgtaggtgataaagccatatcctgtgtcaaaaagtaaataataaaataaaataaaatggtcccttgaccttttatctttaattttcccattaacagttggttctctcttttttctatctaatgaatacagtatgctgaagacagtttaaattttctttattgattcaagatattgaaaagcttcaagattattaacttgaaagttttcaaaggtttaatatcaacacatttcaggtgtgaggaaattactgtggcatggagaatatgtatatattttatttcaattaaaactctcagtaatatttccttatggcttagcatggaaatactttatgatataaggtgagtctgggttaatttaatttgtaataaattgacaacaaacrtaattagttctaatcaaaaggctaaagattgactccataatggtttttataagattaggagttttattttgtctaaaagtccaacacattatttctggtcctttgaaattactggttcaattttaatgtttataaaatcatattcagttatttatagggatgtttttaaatctatagctggacacagaccatcccaatagttgcttaaaacaacagtagtcttctgttttrcttacaaatgtacaatttgggcaggttttgccagggaagtttgtctgctccatgtggtgtctgctgggatagctcaacttccactagaggtttcatgtccawcatacctcacccacatggctggcaaagtgctattggctgtcaattcctcttcacaaggacctctctgtgggacagcttggtcttttttacaacttggtggctgggttccaaaagtgaaacatcctaagaaacaatattctaagagacagggagtgaaaacagatagtttcttaaggtctgatgctggaaacacacataacctcagtttaactttctcatattgatcaaggaatcacagagctccgattttaggagaacaggatacagacttcagctcttaatgggwgggaggagcgtcaaagaaatttggagtcacagtttcaaactgctacaaggaatatgggaattttactaaattattcttagttgataggtagtttcaaaagggacatagtattagtacgttgggtcagtagtgttgtttagatactatttttcagtgtaatgttttaaaaatcttcactgtttaagactttttgaaaagtgtattttgaagtgttaaaaacaatatttacaagatctatatgaagaaaattagaaaactctgaggaaggatatcaaagaagatcctaatggatacatggataggaagacgctaagcatcatccatgaacgaaaaatgcatcagttaggcttcattaagattaaaagcttctgctctgtgaaagacactctaaagagaatgaaaggacaagccacagactaggaagatatatttgcaaaacacrtatctcataaagaactatatctacagttaacaaataattcttaaaattcaacaataagaaaacaagcaacccaattaaaaagtgggcaaaagatctaagcagataactcaccaaagaagatatacagatgactaataatcatatgaaaatatgttcaacgtcatatgtcattcgggaattacaaattaaaacracaatgaaatagtactacacacctgttagaacgactgcaatccaaaatactgaccacaccaaatgctggcaaggatgaagagagcaagaagtctcatttattgttggtgacaatgcaaaatggtacagcactttggaagagagtctggcagtttcctacaaagctaaaacatagtcttaacrtatgatcagcagttgtgctcctgggtatttacccaaacaagtggcaaatttaatgtccacacaaaaacctgcacatgaatgtttttagcaaaataaccccaatgttcatcagtggatgaagaaagaaagaaaatgtgtatatgtatggttttgaaagatttttttaaagaaaaacagattattatgtgagttgggtgattcttgcataggatttccacgggwttattaaaacaaagtagaactatcgtcagttccacttactagaatcaaatagactgtcatcactagaagaaactttagagcaacaagttcctcattttatgttttcaaaaaataaaatataaaggcagaggagttgagattttctcatctacagcaaaagatgtttatataaataaatatactgataaaaatttatctcatattgttatcaagctgtatgtaaaagacaacacaataaaaaagacaaaaatctcaccaaactgttttacttaaccagagttagaaataaggtttattgataaaaaccaggattagaaataargtttattgattttcattttcaggatatctctttttctttcaggaaacttatacagaaaaacagaataaatggcttgtacgcttataattaccttgaccagtaatggtaattaataatcacaatcacaaccctcagagtttatcctttgggctgagaattaagaatgatactttacaaacctggaaatgtgagcaggccaattaacaaaacaaatagatggacaaaaataaaggcaaacccatgaggcaawgaatgtttttaagtttgtcaaaaatgaatattaaacagcagagtgagtaaaattaccatttattttctaatgattacacattagtcattgtttctacatgaacacttactactgagaacactgttttactgggtacattgcccagtaaaatatgattattaatattttggctgtttttgcttttggctatttgaaaaatgctgctataaacattggtgtacaaatatttatttgagtcttcacttttagttcttttaggtatatactcagtaatggaattgttggatcataggataattctgtttactttttgagaaactgccataccattttccatagtggtagtaccattttacattcccataagggtaccaatttctatacrtttctgttaatacttattttctgtttttatatactaaaatgttgtaaaagggtgtaaaatgctacctcattgtgttttgatttgcattgctctaattagttctgttgagcatcatttcatgtgctcattagccatttgtatatcttttttggataaatgtttatttaggtgttttccccatttctaattgggttgttttgttgctgtttgagttcttcttttaaaatttagaaatgaccccctacttacttgtacaagttcttttacctcttttagatgttgattccttactgttctattttgtattattttcttcttgtctgtcttacacttcacttacagtatatttagttttgatgtttttggttttatgtaatagcttctgtcattttttcctttatgctttctaggctttatatctttttttcttaacaaggtttttgtactcttaatattttccttccatctaccatttcactgatgtgacattccttacaggctaatcaacaaacagatatttactgtataattcatgtgtagtctaaaatttactatagattatactttgtaggtataatttttatttatttatttattttattattattttttgagacggagtttcattctttgttgcccaggctggagtgcaatggcacgatctcagctcactgcagcctccacctcccgggttcaagtgattctcctatctcagcctcccgagtagctggggttacaggcatgcaccaccacgcccagctaattttgtatttttagtggagactgggtttctccacgttggtcaggttggtctggaactcctgaacttaggtgatccgccatcctcggcctcccaaagtgctgggattacaggtgtgagccggcccgcccggcctatttttattttttgtttattcattttttgagacagtgtctcactttgttgcccaggctggagtgcagtggtgcgatctcggctcattgcaacctctgcctccaggttcaagagattctcctgcctcaacctcctgagtagctgggactacaggcatgccccaccaagcccagctaatttttgtatttttagtagaggtggggttttgtcatgttggccagactggtctcgaactcctgacctcaggtgatccacccacctcagcttccygaagtgctgggattacaggcgtgagccactgcgcccagcccggtaggtataatttattaaatgctgtgttcataattgactgtggaccttcgttgctaccttaactgtccagaattggagaaaaacttttctccacatctgatatttgagtcctttaataattgttttctgcttagagggtagtttcttatcacatgatataacttacacaagcacacgttttaatttaggcaaatttttctgaaataattatygttttacataaaaattaaaatcactctttgcaatctaacctatcttaaatttttttacaaaaaatttttaytgtaactttatggtaggattgttttacttaacmtttttgtcctttttattgtattatcttttacatacagcttgatataaatttttatcagtgygtttgtttataataaatttttttttttttttttttgagacggagtcttgctctgtcgcccaggctggagtgcagtggcgcgatctcagctcactgcaagctccgcctcccaggttcacgccattctcctgcctcagcctccgagtagctgcgactacaggggcccrctgctacgcccggctaattttttgtatttttagtagagacggggtttcaccgtgttagccaggatggtatccatctcctgaccttgtgatccgcccgcctcagcctcccaaagtgctgggattataggcatgagccaccgcgcccggctacacatgtttacaaaagatgttatataactttattattacaattagttggaggttaacctaaaattattaaaataaacctatccttaaagtaaattatatatggttttataaattaagaactttactttggattacaactaatatatactaagattttcttaaacaattagkacataatcgttttaagttaaatcccctttgtagtaaaaaattgcacaaaatgggtacagagttttaatctacctaataatttgcactgttttcatctaacaggtctcttcatttgagaaaatatagtgtagcttttcacggttttagttacccacggtcagctgtggtccaaaaatatgcagtggaaaattcccaaaacaaacaatttatgaatttaatatttgctccattctgagtagtgtgatgaaatctcatgccgtccagctctgtctcacccaggatgtgaatcatccctttgtctagtgtatccaggttgtataggatacctgcgttagtcagaacttagtagccatcttggtgataagattgaccgtctcagtattgcagtgcttgtgttcaagtaacctttattttacttaattgatctgttttattattagttattgttaatttattactgcctaatttgtaaagtaaactttatcataggtgtgtatgtattagaaaaaacagtgtatgtagggttcagttctattaacaattttaggcatccactgggcgtcttaaaatgtatcgtacaaggatgagggggarctacttactgcatttagaaaatgtgataacattttctgatatttcagattctcatgagttcacttatcattacccaatgtttttcttgtaatatgtggatttgtttaaaagtatttaaattttttaattgccatgttactgaccttaatgatttccaaaataaaataggtattaagagttgcttaattatacttctttaatataacaaccaggacatgtattttaactttgtgtaaatcatctagagttatttccatgttagtacattttgtgtaggtatatttctgagtggggcatttacagtgataaagaattacataataccttaaatttggtaaataattgacagatattttaaagtatattcataaagcagtaaaacctcttgtattatgttatctttaaattataattaagaaggttttctatatggctgtgtacacattatcaaaattgaacttttagcacaaaaagttcaactatttgtatcagttatttttgtcaattattggttattatgttgcattaaaactatggtagtgaatatattgtattaaaaaaaagaaaggaccaaatgccatatatttggggtggaaatttgagccacagttgtgtatacttacttttgcaatagaaatctatgtcagatagcctaatagtttggaaaactcttaagatgctaaaatgtcacagcacagtcagggatatgtatgacattcagtagtataaacaacaaagtgtacatgaaacgtccgttaacgttaagtaattggagtgagagtrggaaaatgctaatataaaggggctagattctctgcccattttacgtctaacttaatattttcattttaactaattttatktctcccattttgtgaatgggctacaggactaaactaataacattagttatacaaatcattcctatgtaaaatacttttggtgtgaaattagagtgaataaactttttattatgattgggatttttttcttttcgtttctgatgccatccgtttaagaatcagtgttccagaacaattggtatagctttgcatgtttctggctggtcgtgacaaatcagccactgtacactcatagacagcagtacagtacttgtcactggtggcctttctgtgacagagagcctgaagactgacgtaaagcgcagcctgttgtgaactgtcaagtgagtctgccaaaaactcagcagacrgaactaattgcagagaaaaaggacttttgtgccctcttctctttctttcctttccttttttttttttttttttaataagacagatattgttaaagtagcttgtttatgtaagatttgtctgtctctcctctcattgcctggatccttttttaacttaaagtcttgcactgcaggtcgttgaggacttccacatggagattggcacaggaccagactcaagacacacaactcataacagttgatgaaaaattggtaaggattttctactacacactgctatggttctgccttcagggttatttttgtactatagatattcagtatggtgttccaggttttcaggaaagtgatttgaatttgaatttctagattatacctaaattttaagaagaaatatttgtcatcaaaagataatttatattaagcattataaacaaatacaaaaccatatgcaaatattaataaattaaaattatgaaaggttttcatttttgtggtgtttataactagcagaacattcattactttttgtaatgaatgttttgctttttattttctcagttacactcctatttaagttgtgagatacttgctagtactatctaaaactaaatatattaggttttcttggaagcatgcaacatttattatcactatatgtatatatgtatatgcatacaaacacatacacacacattttatttcttcatatgtatgaagaaataactagcaagcaactagcaaacaactagcaagaccagcaacaaatgagtaataatgttttgtgaatcagtaacaaacagaattttggcagccatcacttataaaatwttttagagtgtggtctgttactttacatgcaactttatatttatgcttcaatagcatacattttgtaatgtttccaaaacttctgatagaaatgagtaattgkatatgtgtgcttttcattttatatctggtttaccattatcagtgtttcttaactaccccctttattattgtacagtattttatcactcaactttgagcctgtaagcccaatctaagtaataggtcacacttaaatttctatttgcaccattaaagatacagacaaataaatgtataagtaaatagagacagtttggaaaattcacatcttgtgctgactggttttattttaaaattatctcttcagtttacctactgacattgtcatcatcctgatctaggttacatcatctttcacctagatttctacagtagtctttgacctgatctccctagactctttaatcctaatctgattaattttccttaggatgccaaaatagtctttgaaatgctggtattgtcaccctcttttcgtcctttggtgcttcctgttgcccttagagtaaacactaaaatcctaacatggtctttgacgtcttgcctgatttagctcctgccttcctctctaggtttatcttgtaccactgtgttttacattctgtggtctagccacaccaagcctggaacttgctactctttttcctgcttcaaggcatttggagttcctgttcactctacctggatgcattttaactaatcctgaggacttcatccggtcaccatctacctattcttcaaatggtaatcaaacaccacttgcttagtcaagtataaaagaaatgaggggcagggcatggtggctcatgcctgtaatcccagcactttgggaggctgaggcgggtggatcacgaggtcaggagttcgtgaccagcttgaccaacatggtgataccccgtctctactaaaaatacaaaaaattagctgggcgtggtggcgggtgcctgtaatctcagctactcaggaggctgaggcaggagaatcgcttgaacctgggaggtggaggttgcagggagccgagatcgcaccattactctccagcctgggcaacaagagtgaaactcagtctgaaaaacaaaacaaaagaaatgaggcagttatgtgtgtatgaagtgaggatgattttcacatcctgtgtgttcattaatgagagcactattattttaatttttcctatgagcatctttttttaactctcaggaggttgccttttctataaagttttcaaattttagagttcactaataactcttctaagttctcttctttctagtttgaagaatgagtgagtcagccwgtaatacattgccctaaacagagtgctatgaagcatacaagagaggtagacagactggattggtttggtatttttaattatatgtcataaaatcggttgcatactgttgaattttcttgccstacctagattttccccagctttgttatacctttcttgaagtaatagttgtccctcagtacctgtaaggggattggttctaggactcccctcaagtaccaaaatccgtggatgcttaagacctgtgttagactgttctcrtattgttataaagaaatacctgaggtgggacgcagtggctcgtgcctgtaatcccagcactttgggaggctgaggcgggcagatcacaaggtcaggagatcgagaccatcctggctaacatggtgaaacctcatctctaccaaaaatacaaaaaatttgctgggcgtggcggtgtgtgtctgtagtcccagctgctgaggaggctgaggcaggagaatggcgtgaacctgggaggcagagcttgcagtgagccaagattgcgccactgcactccggcctgggcgatagagcgagactcygtctcaaaaaaaaaaaaaaaaaaaattagccgggcatgatggtgggcgcctgtagtcccagctactcaggaggctgaggcaggagaatggtgtgaacctgggaggmggagcttgcagtgagtggagatggcgccactgcactccagcctaggtgacagagcgagactctgtctcaaaaaacaaaacaaaacaaaacctgagattgggtaatttataaagaaaagaagtttaattggctcatggtcctgcaggctgcacaagcatggcaccagcattgctcggcttgtgaggaggccttaggggaccttttactcatggtggaaggtgaagtgggagcaggcacatcatatgacaaaagcaggtgcaagggacagggtggtgccatacactttctgtcayccaggctggagtgcagcggsgcgatctcggctcactgctacctccgcctcccagttcaagtgattcttrtgcctcagcctcccgagtacctaggattacaggtgcccgccaccacgcctggctagtttttgtacttttagtagagacggtttcaccctgttggccaggctggcctcaaactcctgacctcaggtaatccacctgcctcggcctcccgaagtgctgggattacaggcatgagtcaccgtgcccactgccatacacttttaaataaccagatcccataagaactgactatcactaagacagcactaagctctgcatgagagatctgcctccataacctaatcacctcacatccrtccccactttcaacattgaggattacatttcaacatgagagttgggcagggacaaatatgcaaactgtatcaagtcttatatcaaatggcatagtatttgcatataacctatgcatattctcccatatactttaaatcatctctagattacttacaatacctaatacagtgtaactgttatattgtactgtttagagaataatgacaagaaaaaaggaggtatacgttcagtacaaatacaaccatactttttcttttttcaaatattttttacctgcagttgatttaatccacratacagaaggcacagatatggaggcctgactgtagatcagaccagaatgtcactatggttttccagctgaaatcaattggttattatctttggtacatggcagacattttcttgaaaatgaacctgtcacttcaaggaggtgttgcccatgatacacttcaagcgcagtgatagtttttcaaccgttgtgcccatctctccttcccagaacggtctttaaatactagaaagatgtcaagctcaatcacatccatggcagaattaagttctataaaaattctaacattgtgtactatgctcaatacttggttgatgggatttatctgccacaaatctcagcatcacaaaatatacccaggtaacaaacatgcacatgtacctcttgaatctaaaattaaaaattgaaattctgtaaaaaaaagaaaaaaaagactgttctagtgggattggtaatgacactaacggatgtgatttttgatactgtgtaatgcaatatattaacgtttggaatatctatatacctctatgaactagtatttttcgtatgaccagtgcatgatataaaatcatgcatgggtaaaagtttcctttaaagtacaaaatagagcaatggattttaagtaatcaagtatgaaaatattaaggctatgaatattttgctcctttttctaactacatatctgtatgataatgagttttcttcatatattgcaataaaarcaatccaccaaaacagtttgaatgcaagaacagatgttagaattcagctgtcctccattaagctagatagtagattttcaaacgagtgccaaaatgcaaatgagtgccactcttctcacttttcagttttcaaaaatagagttttttaaattaaaatctttatattattacataactggcttattttamattaaatttatattgttttcttcattttaatttattatgtgatagatatttatggatatacaggcatactttgaagatattgctggtttggttccagaccaccacagttaagcaaatrccacaataaagtgagtcatgaaattttgttttggcttcccagtgcatataaaagttatgtttctaccacactgaggtctgctaagtgtgcattagcattatgtctaaaaaataatgtacataccttaattttaaaacactttattgctcaaaaatgctaacgatcagctgagcctttagggaatcgtaatcatttgactggtggaaggtcttgcctccatggtggtggttgctgaaggttggggtggctgtggtaatttcttaaaataagacaacagtgaactctgacacactgattgacccttcctttcatgaaaaatttctctgtagcatgtgacactgtttgatatcattttactcacagtggaacttctttcaaaattggaatcaagcctcttaaaccccactgctgctttatcaactaagtttatggaataatctaaatcctttgttgtcatttcagcaacgttcacagtctttatcaggagtagattctgtctcaagaaacgacttagctcatgcatggaagcaacttctgatttgttccagtttaatcatgagattgtagcaatttaatcacttgtttaggctccacccaccacatctgcagtgacttcctccactaaagtcttagatccttcaaagtcattcatgagggttggattcaacttctttcttttttgtttttgttttcccatattgaatcaatatttatttcaggacatgccatgtcaaaawaarrcaaagattcaactcttgcctttaacaattgtattgtattataaaagcactttacaactccatcccatgtttaagtataagttactggcatgtgggctaatgattatctgtaagcatttctctattcagatccataatctaggtgctctctgaatattacaaggtgacaataagtgggaagtggaggaggaagaggaaagagaggggactaaggttctcccagtttaaggttttggactcagtttctttcaaacgcgtgctaatgttgctattttcatctcctatgagtcacaaatgttcttagtggcatcttgaatggggaatcctttccggaaggttttcaatttactttgttcagatccatcagaggaatcactatggtagctatagccttatgaaatgtgtttcctaaataataagactcaaaagtcaaaattactccttggtccacgggctgcagagtggatgttgtgttagcaggcatgaaagcgacacccttgtacatctccatcttgggtgaccaggtgcatggtcagtgagcagtaatattttgaaaataatctttttttctgagcagtagatattgacactgggcataaaatatttagtaaaccatgctgtaaacaactgtgttgccatccaggctttgttattcatttatagagcagaggcagaagagatttagcataattcttaagggccctagggttttcagaatggtcagtgagcaccggaattgcattagcctctaagagtcagcctgtcctttgaagctttgaagccaggcgttgacttctctctagctatgaaagtcctagctggcatcttcttctgatacaaggctgtacattgaaaatctattgtttagtatagccacctttatcagttatcttatctagatcttctggatcacttgctgtggcttctctgtcagcacttgggccttcaccttgcacttttatattatatagatggcttccttccttagacctcatgagccaacctctgctttcctcccctctcagtcttcaaagaattgaagagacttagggctcctggctctagattagactttgaattaagggaatgttgtagctggtttgatcttctatccactgaaactttctccagttagcaataaggctgtctctttagccttcttatcattcatgtgttcactggaatagcatttttaattttcctcaataacttttcctttgcattcacaacttggctgtttggtgcaagaggcctggcttttggtctgtctaggtttttgacatgccttcttcacctagcttaatcatttctaaatttttacttaaagtgagagacatgagactcttcctttcacttgaactcttattgttgggttattaactggcctaatttcaatattgttgtctcagtgaatagagaggcccaaggaaagggtgaggtacgaggaaatggcttgtcagtggaggacacacacaacctttattaatttagtttgctatctaatatggacgcagtttgtggcaccccaaaacaattacaatagtaacatcaaagatcacggatcacagagcaccataacacatayaatgcaaaagtttgaaatattgggagaattgtcaaaatgtgacacaaagacttgaaatgagcacacaccagtagacctcaacagagggttgccagaatccttaaatttgaaaaaacaaaaacataaaaaaacaaaaaaaaagaagcaccattaatctgtgaagcacagtaaagcaaagttcataaaatgaggtatgyctgtatcttttataaacaaaaccttggagtcccagtagtttttaacagtataaaggaatctcaacatcaaaaagcttgcgaatcattctcctaagtcttctcttttctgggttaaacatcgccagggctttgatttatttcatatgagttccagttaattaatcatcttgattgccatccagtttgaatctcttttaaaatgtttttgccagaatttttcatactacagatgtggtgcaggttgtggtggggattattgcctttattccttttaatcatcgcagttctagtaaggcaactttaaatttaggttgtcatacttatgtggatttcatggagagctaaaacctcagattctctcttttgtgtgctgttatcaagtcgtgtttcttttcatccatctttagtatatgatcattatttttaacatattcacagagtcactcataggacatcttacccagtaaagcttattttatttttttactgttacattttagaattttctatacagtatacaataaattacaagaattttcatagtactttgtggatgtcagtgctaatacaagtacaaagaaaaacttgtggtttttttttttttctgggcatcaattatgtatcaacaacatgtatcttatcttttttttaggcataaaatgtagaaaggaaaagtctgcttagcattttctagtgcaagaatctattctttcattttggaactatatacaatgttaacattgttgagtacaaatcttcagataataaaattgtggcaaatcctggattattgttaataaagaatatggcctcagagtactttctatgtttctaattagtcaattttagtttgttgtgtataaactgctaacctttttacccttgaaactaacaagaatgtaaatatcaaaagagtagatgacagcatctgaaaataatcctgtaagcttatgtttagaagcacaatgcttaaaaaaaaaaactttttgtggactgtaccattatttcctaatatatgatacttcctacagatactaaggagatcttataaatggttgtttgcttggcccttggtttttgttgcaggaggagctgtgccatgaggttaggtgaagaatgtctttgcctttgtgctttattatgagggtaacttttttttctttatgcctccctccacctcagtctcctttcaggacatttgatgaatacgcaagtccaatgaacatgttgtcttttttatattcacttcagctatacaaaagagagaagttaaatttgcaatgctctttaaagattttgagtaggtactcccctaaaaaacaaccaaaatattaattagtcctacataggtataccttcaatttgctttctgatcatttttttagcccattttttacacactgattcctataactatttagtacagytaaaatattactaagaaaatagaaaaataccctcagaaaatatagtagtttcaatttattagtaaaaatgacacaaaataagctttaatagtttagacattacatatattgtttttatataaattatgttggctgctatctctccttcattctttgtttatttattcaataaatacttacatatgccaggcactatgcttcagtgttgtattgacactttacattgttttcatttatatgctaagttattttgtttaaaaactattaagcaccacctgttttaacttttacaaaggtagtatagttagttagatatgcatcctcaatttaaatrtatgtgaaaaaggaaactttttatttagcaatctgtaaaacttaaatcttttgggagtgtgtggagtgaggaaggacatctattatttcaaaacttttttgagaaattatagcacaatgctattaatgtaaaatcctaatagttttgacatttttagcactctaataatatctttatttaaaaatcaggtgtgcctgtaaaacaaatgttgtcagtattctgaatgttgccaatkggttgtattttgctacttgaaaatttcttccaaatagcaattaaacagcacttaagctttggtacttgctgaggcttgcaataaataaatcgctgtttgattaattagcacacggtactggtagcatgctcagccgatgaggttttaatattgctgtgttagaatgtctgtaagcagcagcaagttatttaatacaatttttttgtcaatttgtaatagttaaaaacattttattactcgaacttattctaagaagtttgtaaaattgaatggtttttgcaagtcttcgaaaataaaacaactacgtttgctgtacaagtatttgttggttttatgttgttttttcttcctgacatactaaaagtttatagatgaaaacttatataagtctgcaaacttgaattaaaaattgatcattaagaggtgacctacacaaaaagataaccttaagttaaaggcttacttttgctttgactgtttactttttttttccccctctaaggggtcagttttcttttggtgagattactttcttttggtgtatggcagtgctatctctgctagattactggaaggagtagtgtctgcgattggggttatacagctttctagcatctcaagtgtctgttttgtctggactttactcacgcagcattcttgtgcaaaaatttcaaggctttagtctggagcactgggtcaaaggatatgtctctttgaagggtagacaggagttttttatgttttattcactaagtagtatttcattttacatcaaagaatagcagcctttgagaacctaccatggtggcagtttagcgtgtgggtttttttctttaagactttcactaaatatgtataatgtttcttcaagtgtttcatcctacaaaatgcctatttttattcttagatgaaacttctaatataaaaagagaagaatcatgactaaatataaatgtttgttgcaataaattttgttttaaaagcaactatagtttttttttttttacaatgtatttccctgtgtcagtttttacactacccacaagctattgaaaaaaaaaaaaatggatgaatagcctttaagattgcagcaatactgttgcttaaaattctaaggaagcagtaatgactagtgattttggaagtgtagatttcatagtgaaatggtcattccttaattgttccttttttagtactgtcatgtgtgtatgtaggagagattgattttgaaaaataccagactcaagtaatggaaaatgttaagacttcttgaagctagaaggaaagcycttctttttgtactttttgtgtaagttaatcagtaaataatcatataaaaagtgattgctttacatgtttggaagattattacattgtatttcatatttttgtctcatgacatgtatctataaacatgaactaatattaaaagttttttatgtttataaataaaacatgctcttaaatagttgaaagtttatcaaaayagttaatcrtttaaaatgaattttttctactctccttgatgtaattttaaaacctgttatatttaactatgatgatcattaaaacaagtcagttattatttttcaaatgtaattatttcwaaattctttagataaataaaattctgcagaactttgttgtttaaaatatatgcttattgaaatgctatttttatgtagtatcaagctgtgtaaaacttacatgtactaaatatcacaaagaaaatgaatgttaagtattacagtttttatatacagacaggaaccattaaaacttagagaatgatcgttctatatttaaattgtttaaggaacaaaagatctttcccctacagtattcagccatctctattatctgtgattcttcagcaattaaagcagatttatttccctctttgttcctacttggaatacttgaacaatactggagaattgaactgactgaaatgttttatctttcaaaaggtttaaagttctatgtaccaattagcaaaatacagtaaaggtttaaactgttaatagccacaacatctttaatgcatagacctgtagtatgctagtgctgtataacagttctccattgtgtgtctcttttaagcagagtaactgtgtcagttcttttcttgctttactacctgctgtgtatggaaattgtgtatcgtacttgacacttgctttcaagaatttaaaattcttgcatgttattatgtaggaaactttggctctcaagaaaatagaattgataatatttcatttgtttggattttaagtttaggttttttgtcatattctagagagtactcatttatatctgaaaatacattattagtctattactcattagtgaatttgaagtacataaactgtatgttatctccttgaaaattgcttatctaatttttttcatttaactgaatataattataaagaaaccatcaaatttatggtagggtatgcagatagatccctgatgctttattttacactctatttgaatttggttttgggttttttgttttgttttgttttggtctttttggtagtaaatagtactttgtttttaaagttatagctcttgaattagccagsttgccagataagtttataactcaagaattaatccaaatacttaaacttgttaaagccttatatctgccattttgtagtaagttctcaatgaaggtagggtgagaggaggtaaagaaatagaagtagtatcttttggtgacaattatattttctttttatatcatgtatctcagaatagaattagagcaaaagaaaggagaacgtagactttaaaatttgagactagcaaactttgattctatttctgtgttcaggttttctaattttatatgacctagtgtctgcttctattctactcttcaaaataccacctgcaagcatgtgagatattcatgttttataagatggggaagtttgaaaaatagggcagtgatatggaagctttactgtatgcagtatactatgtctccacaaaactgcttctttataaggcatacttttctagaaatgtgtgaataggctttttgttcagttgctgtttcatgtttaatactttacttctaaaggctttcagcatatttcatgttagttgatgagggtttttaaaatgttaatgcttccaataaaatagacatgaaaaataaacttggctttctctaaacaacatataggatacagaaatataccaaaatgttgggctgagaatgctaacttaaagaactgaggatctgattagtgtaccgatgtacatctattccagtgattactgagtatatattgtgtaaattaagatgtatccattaaagataatttttaaacctaattgggtagtttaagatttgacatccaaagaattaaaacaagatttctgatttagtatgcattataatatcttaaacattcaaatatggcagctatagcctgtgcctaggttgctctgagattagaagtcctctagatctagtagttttcatctaggacaatctgtagttgtgaagatcattcaagatatttttttacttgtctcttatttataatgtaaaatattattatcctttccttcattcattcaattttttttttttagcatattctaggccctggggatgtagctatgaacaaarcacaacaaccatgtccttagagcttatattctcatgcttaagcatatgccagctttattcataaataattatggtatttttcatagattatgaatattatggaaaaaacaaagctaggtgatgagacagagaatagctggggtttgggtgraataggggtcatttaagtagggcagtcaacgaaacccactttgagatgttgtgctgtgtgaattaagatctgaattgatgagaaagaagcagctgtgtgagtatstaaggtaagagcattttgagtaaagggaaaagctaatgaccaaaagtgtagctggtagtagtcaaataacagacggaaagatatgacataataagaaaggaggagaatgatataaaatgagatcagagatgtgggcaggagctggatcaggtaagaaggctctttaggcccatagtaagaaatttgaatattatttgaattataatgagaaggctttatataattctaagtagaaaagtggtttgatccgatttacttgtaaaagctagaaaattactaagctattatggttaagggcaactttaaagaagctcaaaggaaatggttagtttgctgccattttaatttgaaggaacctaatttttgtctttgcataggttttatatacgatataacaatttggtgattttttttctattaaagaatcttctgaatttgaaattgctttttgagaaaggcagtattgggaccaggaataataaactcatctctctaattctccatagcccttctttctctgccctgcccccttctccmccaagggaaaacatgttaaagatttgtcatagtggtaaaggaagataagaataaattggctgaggtgctgtccaccagtttggtgctgatagcttcaaatatatttgagttctgcaccttgcttttgccagtggcatgggttgatggtgatagttgtctgtcttcatcttaactttgactgcacttcctcttgttctgcctctcctttcccccctcttactctctgcttcttgaaatctctcttcacagtttgtatggcttttcccctctgtcttttgacactctgtcttttgctgactatgtagctgtaggtcatctctctctccctttctggctacatgtgttttcctgataccaccttattcccttccatttttttcatttttcctgccttcccttctgtctctctctagttttggctttctgagtcattctttggccgtcattttttcccccactcccctgtctcttctaccgcccgttttcttcttccttccattctttttattccgtacttctgttccttttatctttcttcttctttctctcactttcccaaaatgactaaggagcaacatcaaaactagtgggagagacaaaaggtgccccaccctctaagcacttttttaaaaattgtcatatttcctcttttgtaaatatataggacttttagaaacatttaataactgaaaaatggtttatacattattacattatttgaaatgttcactctagtgagatacatgggataatggcaagatcatggactaattataaatatagccttagatctttagtcatctcttcttttagctgtataacctgaagcaagttatttaacctctgtgagtgtcctcatcttataaaatgaatatacctttttatatttgttttgaaagttaattgagaataccaacactaaacaagaggagagcctggatgcagtggctcacaactgtaaccccagcactttaggaggcctagttgtgaggatcacttgagcctaggagtttgagaccagcccaggcaaatggggaaacctcrtctcttccaaaaaaaaattagccgagggtagtggcgcgtgcctgtggtcctagctacctgggagactgaggcaggagctgaactattaatactcaggagattgaggttgcagtgaggcgtgatcatgccactgcactctagcctgggtgacggagtgagaccctgtctccaaaataaataaataaataacgcattatgttcattattcactaaaaagtgtttttcttcctttttttgctacttggagttgttagcctggagagagaagcaagctggaattataattattattcttaatcagttttgaattattatggagcccattcttgtgaatcaaatctgcagtgcaggtactaagttctagggcaccctggagcacaatattggcttcacagtggtcctgtgttagtcatgtgtgtatacgtatgtacatgtatagttggtaatgatttttgtcatgtaacttgccttttctaacagcctgtggcactaatatcatctgtgatattatctctcaatatacagtttctgacaatcaactatgtaattctttaattggtagataggtgtattgctatataattatccttccagtgagaaatttctttattctttttaatggtggaaatttgtaactgtattacttcaaggaagtttccaaagtacttattcctattattatatttggtcattaaaccctgtgtaattaaaaaattactggttttaggctgggcacagtggctcaaacctgtaatcctagcactttgggaggctgaggtgggtggattgcctgagctcaggagttcaagaccagcctgggcaacatggtgaaaccccgtccctactaaaatacaaaacattagctggtcgtggggtcacgtgtctgtagtcacagctactcaggcggctgagacatgaaaattgcttgaacccgggaggcggaggttgcagtgagctaagatcgcgccactctactccagcttgggcaaccgagtgagactgtctccaaaataataataataataataataataattactggttttaatagtaaggcatagacatatcaaaaatcacattagaggccgggcacggtggctcacacctgtaatcccagcactttgggaggccgaggcaggtggatcaggagttcaagaccagcttggccaacatagtgaaaccccttttctgctaaaaattaaaaaaaaaaaaaaaaattagccgggtgtggtggcgggtgcttgtggtggcgggtgcttgtagtcccagctacttgggaggctgaggcagaatcgcttgaacccagaaggcggaggttgcagtgagccaagatggcgccactgcactccagcctgggtgacacagcaagactctgtctcaaaaaaaaaaaaaaaaaaaaaaamcacattatacatcataaatatatcaaattttactaccaataaaaaagatacatattttttaaaaacatagtaatatgtacatgttgtggaaacattaatttggaaatgaagaaagcataatgaagaaaattaaaatcaccttaatctcagtcttggtgaatttacttcttttttatatgaatatttaaacacactaatatctaatgtatttatatgtaagacaaattgttttacagttttttatcctgtttttcactttattataatgtgactatatttctttaaaattattcaaaagcataattataaacgaatgtataatctttcattgtatggctgtaccataataccttagccatcatgcagtttttgtactgcaggttgtttacaattttttgcaactatacgcaatgctagaatgaacatctttatacctaagtctaatctttgatgacatctttattttagtatcaattctttgaagtggaattactaaattgaagggtttagtatcaacattttaggccaggcgcagtggcaaggtgggaggattgcctgagcccaggagttcaagaccagcctgggcaacatcgcaagaccccatctcaaaaaatgtaaaaaaaaaaaagtatcaacattttaaatattttttgatacctagagataattgatacagaatrcttktagagaagattttaccaatgtaactttagagatatggctttatttttaatatacatggcctagttctgtggatacttttcagactctgacacagggggcatgtagcaaattctacctaatagataaataccatatatctaagaattagagtataataaaaatacttaatacattaatgatgcaacattgatttagaagtacttcaaggcttagtatatatatcctaaggatcaacttacaaatttatgtatcattgtactataaattggtggatattgctggttgatgagatttctatcacaaatctctgtatactaggccaatgcatagcagttagtgctacagaagcattaactattgctgctgctgctacattagtaccactgttactattattttataaagcattataacagagtttgtggcataatgtatctgaggaagttatgaaactttctacctattcttacattcagtctatgtttttgttttgttataaagcctttccaaaacaatgcaaggtaaacatcatcctctgaaatatctacagtacttcatcatttatttggcgaactacattattactgatttcaaatttaattcygtagtcagcaacatactctatgatttcaattttcagatttcttgagacttttttatcrcctagtgtatggtctgtcttgattaatgtttcatacacattttgaaagaatatgcattctccagtttttgggttgggtgttccaaaaatttcaattaagttttaagttgactaatagtgttactcacattttgtatatctttaccaatatttttgtccacattttctgttagttcttgagagagaagagttaacgtctcaaactataattggtatctttcctgtgtgtgttggatcacatttttgcttcacttattttgaaactactgttggttgrtgcattaacattgaaaattgttgtgtgttcttgataagttgttgctttattcttatgtgatgtccctctttatcctggtgctgtttctttttctgaagtcgaatttgataataatatataactgcctcagttttcttattcttagttttgtatggtacatcttattctcatttgtgagtttatatttaaagtttgacctttgcgattatatgtgggtcttacttttttatttagtttgacaatttctgtcttttaattttgtgtttaaaaaattatgtgcaaaatatttattgatataattgggtttacatttaccatcttgctgcttgttttctatttgtcctatctgatttcttttttctttcttttttgttttaacagttgctttagggattacaatatgcatccttaacttttcatagtctgccatgaactaataatgtattacttcatatgtaacataagaaccttaaaacagtacttccacttgtcattccagtcctttgtgttaatgttgacacacattttacttccatatttgttataaacctcatagtaaattttttttttttttttttttttttttttgagacggagtttcgctctgtcgcccaggctggagtgcagtggcgcgatctcaactcactgcaagctccgcctcccgggttcacgccattctcctgcctcagcctcccgtgtagctgggactacaggcgtgcgccaccatgcccggctaatttttgtatttttagtagagacggggtttcaccgygttagccaggatggtctcgatctcctgacctcatgatctgcccgtctcggcctcccaaagtgctgggattacaggcgtgagccaccgcgcccggccgtaaattattatttttgcattaaacagttgtcttttaaataaatttagaagtgagaagaaaaatcttttgtacttactcacaaatttatcatttttgttgctcttaattattatacttcatgtagataaagtttccatctggtatccttttcctttagcctaaagagccttatttaacatgtcttacagtgctgttctgttgggcagaaatctctcagcttttgtttatctagaaatccctttattttgactccacttttgacagaccttgtcttagctcagggtgccacaacaaaataccatagactgggtggttcaaacaacagaaatttagtttctgacagttttgaaggctagaattccgaggttaaggtaccagcatggtcgtttctgttgagggctgtcttcctagcttgtggaaggccacctccttgatgtgtctacatggccacagagagagagaaaaagcaggtgagctttgtcatatctcttctcataagggcactaatcccattatgagggccttactcatgatctcatctaaccctaattacctcccaaaggccccatttctaaataccatcacatttaggattagggactcactatacaaattttgggagaatacaaacrttcagttcataacagaccttttcattggatatagaattctaggttgaagattggaatgacttaaaaatgtcattccagtttccttttttgaaaaattatgttaaaatatacattgcacaaagtttaccatttttaagagcacaattcagtggcattaaccacattcataatgttaagtaatcatcaccactatttccggagctttttcatcatcccgaatagaaactctgtacccattaaatattaactgtcctttatgctctcccctgttcctcrtaacctctattatactttctgtgttatagcatgtgtcagaatttcattccttttaaaggctctacataatagttccattttatgtgtatatcacactttgtttatccatccttctgtcgtcgaacatttggattgtttctagggctattgtaaataatgctgctattaatatggatgtctaaatatttgttcaaatctctgctttcaagtttttaggaagatgccccaaagtagaattgttggatcatgtagttattatacgttgagcattttgaggaactacatactgttttccatattggctgcaccattttacattcccacagcaatacacaaaggttccagtttctctgcatcctcaccaacatgtgttattttccattttcattataatagccatcctaatgtgtgtgaagtagtatctcagtgtggttttgatttgcatgttcttaataaattagtgatgttgagcatctttttgtgtgtttatttgccgtttatgtatctttggagaaatgtctattcaagttctttgttcattttgaattaggtgtttgtttttttgttgagttttcagggttttctgtatattctggatcttaatcctctatcagctagatgtcctttgatgcacaaaaattttaattttgatgacgtctgatttatctgtatttttttgttgcatgtgcttttattgtcatatccagtaattccttgccaaattcactgtcgaagatttcctcctatgttttcttctcaaagttttacagttttagctcttccattgaggtctttgatctgtttttttgtttgcttgtttgtttgttttgagacggaatctccctctgtcacccaggctagagtgcagtggcgcaatctcggctcactacaacctctgcctcccgggatcaagcgattcttctgcctcagcctcctgagtagctgggactacaggmgtgcaccaccatgccctcctaatttttgtattcttagtagagatggggtttcaccatattggccaggctactcttgaattcctgacctcatgatctgcctgcctcagcctcccaaagtgctgggattacaggcatgagccaccacgcccggccctttgatccatttttagttaactgttgtatatggtgtaagacaaggattcattttcattctttagaattggatatccagttttcccagcaccatttgttggtgctttccacatcaaatggtcttggcacttctttaaaaaaccaattggctatatatgcaagggtttatttctaggctattttatttcattggcccatatatctattctctgtcataccaaactaattattgtagctttgtagtaagttttaaaatcgggatttatgagtcctccagctttgttcttcattttcaagattgttttgaaacaaagatwtcacgtgaattttaggatggatttttctatttctacccccaaaatgtcactttttatagggattgcaytgaatctgtagattgattgctttgggtagtattgtcatcttaacaatactgatgtttccagttgatgaacacaggatgtcttcccacttacttatgtctttaatttcttttaacagtgttttgcggttttcagtgtacaaatctttcgttttctaagtttgttcctaagtattacattcttttctatgccattgtaaatgggattgtttttgtaatttactttttagattgttcattgtgagtgtatagaacataactgrtttttgtatattgattttatatttgcaaccttggtgaatttgtttattatctctaacaggtttttttggtggaatctttagggattttcacatatgtcatctgggaacagagataattatacatctttacaagtttggatggcttttatttctttttcttgtccaattgctctggctagaacttccagtactacattgaatagaattagtaaaagtgggcatcattgtctttttcctcatattagaggaaaagctttcagtcttttctgggtttgtgttgttgtttggtgtrttttgtttgtttgtttgtttttgttttttgagatagggtctctgtgcagtggcataatcttgtctcactgcagccttgaactcctgagctcaagagatcctcccacctcatcttcctgagtagctgggaatataggcacacaccactatacccagatagttttggctttattttttgtagaaatggggttcgccatgttacccaggctggttttgaactcctgagctcatgcaatctgcctgcctcagtctcccaaagtgctgggattacagttttctgttttcttttatcatcattactgtgtaggtaatgtgtctttcttaagactacttttatgataattatcttatctttaaacttcagaaattttgttatactgtgtttttgtgtggttttctttacatgtatcttggttagggttcattaagattcttggaatttttgattagtattcttaaaaattggaaaatttggaaatttttcttcaaaaaacatttctgcttcaatctttcatcttctgtaactataacacttatattgtactgcttaatattttccagccagtcactgaggcccagtttgacttccagtctttttccactatgtagtgcaatttggttagtttctattgtcctgtcttcaaatttactgatcttttcttctgttggtgtccaattttctattaatcccttacagtatttatcattttagatactatatttttcagctctagaatttctatttagttctttaatatagtttccattattctgcagaaatttttgaamtgttcaactcattttgtccatcttttttcttgaaatcttttaacatatttatagtcattatttataaacctacatcatttcagggcctatttctattgattattttgttattgtagttgttgtttcccttttacatacacatttaatgatttttttaaaattatactttaagttctggggtacatgtgcacaacgtgcaggtctgttacataggtatacatgtgccatgctggtttgctgcacctatcaactcatcatttacattaggtatttctcctaatgctatgcctcccctagccccccaccctctgatgggccctgggttgtgatgttccccgccctgtgtccaagtgttctcattgttcaactcccacttatgagtgagaacatgcggtgttaggttttctcttcttgtgttactttgctgataatgatggtttccagtttcatccatgtccctgcaaaggacatgaactcatccttttttatggctgtatagtattccatggtgtatatgtgccacattttctttatccagtctatcattgatgggcatttgggttggttccaagtctttgctgtcgtgaacactgccgcaataaacatgtgtgcctgtgtctttatagtagaatgatttataatcctttgggtacccagtaatgggattgctgggtcaaatggtatttctagttctagatccttgaggagtcaccacactgttttccacaatggttgaactactttacacttccaccaacaatgtaaaagcgttcatatttctccacatcctctccagcatctgttgtttcctgacattttaatgatcgccattctaactggcatgagatggtatctcattgtggttttgatttgcatttctctaatgaccagtgatgatgagcattttttcataagtttgttggctgcataaatgtcttcttttgagaagtgtctgttcatatccttcacccactttttgatggggctgttggttttttttctcataaatttgtttaagttctttgcagattctggatattagtcctttgtcagattgatagattgcaagcattttctcccattctgtaggttgcctgttcactctgatgatagtttcttttgctgtgcagtagctgtttagtttaattagatcccatatgtctattttgacttttgttacaattgcttttggtgttttagtcatgaagtctttgcccatgcctgcatcctgaatggtattgcctaggttttcttctagggtttttatagctttaggtcttacatttaagtctttaatttatcttgagttaacttttgtataaggtgtaaggaagggatccagtttcagctttctacatatggctagccagttcccagcaccatttattaaaaagggaatcctttccccattgcgtgtttttgtcaggtttgtcaaagatcagatggttgtagatatgtggggttgtttctgaggcctctgttctgttccattggtctatatatctgttttggtaccagtaccatgttgttttggttactgtacccttgttgtatagttaaaagtcaggtagcatgatacctctagctttgttctttttgcttaggattgtcttggctatgtgggctcctttttggttccatatgaaatttaaagtagttttttcgaattctgtgaagaaagccagtggtaccttgatgggtatagcattgaatctgtaaattactttgggcagtatgtttattttcacgatattgattcttcctgtccatgagcatggaatgttctttcgtttgttcgtgtcctcttttatttctttttgcagtggtttgtagttctccttgaagaggtccttcacatcccttgtaagttggattcctaggtattttattctctttgtagtaattgtgaatgggagttcactcaagatttggctctctgtttgtctgttattggtgtataagaatgcttgtgatttttgcatattgattttgtatcctgagactttgctgaagttgcttatcagcttaaggagattttgggctgagaccatggtactttcatgatacacaataatgtcatctgcaagcagagacaatttgacttcctcttttcctaattgaataccctttatttctttctcttgcccgattgccctgaccasagcttccagtactatgttgaataggagtggtgagagagggcatccttgtcttgtgccggtttttaaagggaatgcttccagtttttgcccattcagtatgatattggctgtaggtttgtcataaatagctcttattattttgagatacgttccataatacctagtttattgagagtttttagcatgaagggctgttgaattttgtcgaaggccttttctgcatctattgagataatcatgtggtttttgtcattggttctgtttatgtgatggattacatttattggtttgcatatgttgaaccagccttgcatcccagggatgaagcygacttgattgtggtggataagctttttgatgtgctgctggatttggtttgctagcattttattgaggatttttgcatcgatgttcatcatgggtattggcataacattttctttttttgttgygtctctgccagtttttggtatcaggatgatactggcctcataaagtgagttaaggaggastccctcattttctattgattggaatagtttcagaaggaatggtatgagctcctctttgtacctctggtagaattcggctatgaatctgtctggttctggactttttttggttggtaggctattattgccccaattttagaatccgttattggtctattcagagatttgacttcttcctggtttagttttgggagggtttatgtgttcaggaatttattcatttcttctagattttctagtttatttgcatagagttgtctatagtattctctgatagtagtttgtatttctgtttgatcagtggtgatatccactttattgttttttatttagtctatttgattcttctctcttctttgttagtcttgctagcagtctatctattttgttgatctttttaaaaaaccagcttctggattcattgatttatttttttgaagggtttttttgtgtctctgtttccttcaatcctgctctgatattagtcatttcttgccttctgctagcctttgaatttgtttgcttttgcttctctagttctttaaattgtgatgttagggtgtcagttttagctctttcctgmtttctcttgtgggcatttagtgctataaatttccctctacacactgctttaaatgtgtcccagagattctggtacgttgtgtctttgttctcactggtttcaaagaacatccttatttctgccttcattttgttatttacccagtagtcattcaggaggaggttgttcagtttccatgtagttttgtagttttgagtgagtttcttaatcctgagttctaatttgattgtactatggtctgagagacagtttcttgtgatttctgttcttttacatttgctgagragtgttttacttctaattatgtggtcaattttagaataagtgcgatgtggtgctgagaagaatgtatattctattgatttggggtggggagttctgtagatgtctattaggtctgctcggtgcagagctgagttcaggtcctggatatccttgttaattttctgtctcgttgatgtgtctaatattgacagtggtgtgttaaagtcttccagtgttattgtgtgggaggctaagtctctctgtaggtctctaagaacttgctttatgaatctgggtgctcctgtattgtgtgcatatacgtttaggatagttagctcttcttgttgaattgatccctttaccattatgtaatgcccttgtttgtctttttcgatctttgttggtttaaagtctgttttatcagagactaggattgtaacccctcctttttttttctttccatttgtttggtagatctttctctatccctttattttgagcctatgcatgtctttgcctgtgagatggatctcctgaattcagcacacaaatgggtcttgactctatccaatttgccagtctgtgtcttttaattggctcatttagcccatttacatttaaggttaatattgttatgtgtgaatttgatcctgtcattatgatgctagctggttattttgcctgttagttgatgcagtttcttcatagcgctgatggtcttcacaatttggcatgtttttgcagtgtctggtaccagttgttcctttccatgtttagtgcttccttcaggagttcttgttaaggcaggcctgatggtgacaaagatctctcagcatttgcttgtctgtaaaggattttatttctccttcacttatgaagcttaatttggctgggtatgaaattctgggttgaaagttcttttctttaagaatgttgaatattgacccctactctcttctggcttgtagggtttctgctgagagatctgctgttagtctgatgggcttccctttgtggttaactcgacctttttctctggctgcccttaacattttttcttcatttcaaccttcgtgaatcctacgattatgtgtcttggggtcgcttttcttgaggagtctctttgtggtgttctctgtatttcctcaacttgaatgttggcctgccttgctaggttggggaagttctcctggataatatcctgaagagtgttttccaacttgtttccattctccctatcactttcaggtacaccaatcaaacgtatatttggtcttttcrcataatcatatatttcttggaggctttgttcatttcttttcattcttttttctctaatcttgtcttcttgctttatttcattaatttcatcttcaatcactgatatcctttcttcagcttgatcgattcggctattgaagcttgtgtatgcttcacgaagttctcttgctgcatttttcagctctatcaggtcatgtaggtttttctctacactggttgttctagtcagcaatttgtctaaacttttttcaaggttcttagcttccttgttttgggttagaacatgctcttttagtttggaggagtttgttattacccaccttctaaagcctacttctgtcaatttgtcagactcattctccgtccagtttccttttcttgctggtgaggagttatgatcctttggaggagaagaggcattctggtttttgaattttcaccctttatgcactggtttctccccacctttgtggttttttctaccttcggtctttgatgttggtgacctatggatggggttttggtgtggatgtcgtttttgttgatgttgatggtattcctttctgtttgttagttttccttctaacagtcaggcctctcagctgcaggtcagttggagtttgctggaggtccactccagaccctgtctgcttgggtatcaccagcgaatgctgcagaacagcaaatattactacctgatccttcctctggaagcttcgtcccatagaggcrcctgccagatgccagccagagttctcctctatgaggtgtctgtcrgcccctactgggaggcgtctcctggtcaggctacacggcagtcagggacccacttgaggaggcagtctgtacattatcagagcttgaatgctgtgctgggagaaccactgctgtcttcagagctgtgaggcagggacgtttaagtctgctgaagctgtgcccacagctgccccttcccccaggtgctctgtcccaggggaatctgggatttatttgtaagtccctgactggggctgcttgccttttgttcggtgatgccctgcccatagaggtggaatctagagaggcagtcagccttgctgagctgtgatgggatcctcccagtttgaacttcccagcagcattgtttacactgtaaggataaaactgcctactcaagcctcagcaatggcggactccactcccaccaccaagctccagcatcccaggtcgatctcagactgctgcrctagccatgagaatttcaagccaatggatcttagctttcatgggcttcatgggcacgggacctgccaagccaggcaccgatgggaatctcctggactgccrattgcgaagaccatgggaaaaagcacagtatctgggcagaagtgtaccattcctccaggtacagtctgtcacagcttcccttggctaggaaagggaaattccccgaccccttgcrcttccctgstaaggcagtgctgtgttctgcttcggctcgccctccgtggtctgcacccactgtccagccagtcccagtgagatgaaccaggtacctcagttggaaatgcagaaatcacccatcttctgcatcagtcttgctgggagctgcagaccagagcagttcctatttggccatcttgccagaaaatacagttaatgattwttaagtgtgtaattkatgttctgattgctttgttactgggagcctggattttactgtcttcctttatacagcatttagatttgtttcagcagtctactactgctgatcagcttaatccttttagtgattgatattaagcattgtatgggcagtcatagagttgctcttcttcttacgttttacctttcttgtgtctcaatttaatgcccagagtgttcagcaaaatctttactctgacttgttagaacttctcattacttgtcccacttcacagagtctcattgtagacaaagactgtgcagatttctgaaactccttttttgcttaactcctcttcagaactctgcctcagaaatgtcatttgactcagcatgyctgaatgccaatccctaccttttctgctctgtgagattgctttgttctgcttgggatttacctttctgtaccatagtctgatatgtgcccccatgcatgaagctgagacaattataggactgcatcttgagttttccttctttcagggaacacagtgctgtgctttctgttatcaggttgtccaatacctgaaaacagttgcttaaaataactttcctagttttatagtttgtaaaggcaagagtggtagtctgatcccattatggattgcagcaggatccatatactacactgtgacaattcttttgcaacagtggctttgttaatgaatctttactttttaaaccaacctttaaaaatgtgctcagttattgatgttctcaattctctttataaaacatacctactaacacccttgacatactacatatgtggcttaattaaggcttcattttagtatattgccagacttcagctttcagtcattgagtcgtatgctttatcaagactcagcgagcttacttccatacctgtctctgccagttatacttgacattgtaattcataatgtaactgagtgctataatctgcttatatgaggacaagagagtcctttctgtaacagttctgttgaatactttgagaagatgataaaggtgaatttctaatgatagtgttcaagacatggaaccccacaatatggtgacttggcatattgaatattttatgaagaaggcagaagcaaaaaggtcactgtgaccttccccactccctgtctcttatgaggtaagttgtaaaacctaggaaggattttttgacctttccctgaccatacaaccttatgtgagagttgccttacctatacattgaggaagataaaggatcacagagaagaatctgaacaaaaagccttgctaagtttctgcagtctattaccattagatcacacctcctttatcctatcatatttctgactacccactcttcatctagcctacgcataaaaacacacaggtttaactcttttttgggtcttcatttccgtatgaaggcttctgtgtcacataaaacttatattaaataaatttgtatgcttttctcttgttaatccgtcttttgttttgggaccctcaaccatgaacccaagatgggtagaagaaaagatattttgtctccttcatactaataattcctgtcaaagtatgttgagtaaggcaattgtaaaaagattgtgtgtggtgtaaaaggaaatcattaaattctaggcagattttggactcagattatttcacaaacatttttatattctcacttcacatttacaaaactgaaactataaattgtagatggtgtattttcttgatggtttatggaaaaaacaccacttgggattttgataaatgracctatactcaaaaggtattgcccaaatcagattattaaaagaatacacgtgtacattcttgcattataatataatgtttaaggtttgtgtatattgcttacttaagtgtttccctggttttactagtatgttcaggcaactgagctaggaccagttcttaacaacagaaaggaaacttctgttgcatagttttttattcttatgctaaattgacaaggaatccccttacacttttttaatatgccttcttgcaatctagtttgacttgcacatcattgcctcatgaatatttcattattaaatctgaagcgttcagttttcaatccattattttctcttatttccagtgtccttttcagatgtaattaagttcctttattgcttaaaaccattgcttgattttaggaaatttatgttctggccctttgtcctgatatttgtttatttaagaattatttcatctttagttctttactgccataccttttgttttcataactcttaatgtatgctatgtgttctttagcctttttaatttattaccaggagatgaagagtactgtttaattaagaaataatagattggttctgttctgttctgttctttctttgcttccctttcttttccttcccttccccctccttcctctccctcttccctttttccttccctrtgggtcttgctttattgcccaggctggtctcagatttcctgtgctcaaacagttcatttgcctcagccttctaagtagctgggattacaggcatatgccaccttatctggtttagactggttcttttcaaaaggtaatgttatataagttccaggtaccttagggccagactttttttttttcaccttttattatagcttctgaaaagctgccaggtatcctaagataggtacatgacttgatgatttaaaaatctgaaaaatctggctgggtgtggtggctcacacctgtaatcctagcactttgggaggccgaggcgggtaaatcaccttgaggtcaagcgttcgagaccagcctggccaacatggtgaaaccccatcactactaaaaatataaaaattagctaggcgaggtggcaggcacctgtaatcccagctacttggaaggctgaggtgggagaattgcttgaagccaggaggcggtggttgcagtgagctgagatcacgccattgcactccagactgggcaacagagcaaaaactctgttaaataaataaataaataaataaataaccaaccaaccaaccaaaaaatccatccagacatggtggctcatgcctgtaatcccagctactcagcaggctgaggcgggtggattgctggagttcgagaccagcctaggcaacatggtgaaaccccatctctacaaaaaaaaaaaaaatgcaaaaaattagccaggcagggaggcatgtgcctgtagtcttagctactcaggaggctraggtggtatgatcacctgagcccagaaactcaaggttgcagtaagccatgatcatgccactgcaccctaacctgggtgatggagtgagatcctttctcaaaataaataaataagtaaaaataaaaaagaatcctgaagtattgggttaaaaagcaaatccattaagctgccaaaaagttgaaattattaaatgttatacttttgtaattctaagtattaaaaaatgtattagtttaataattttcaaaatgcttctgttaaacatactggttttcatctaggcattgatccttcatttcttcgttaagcatatttttcaacgatttcagttgttccaaagtttgaacttagaaaacaaagatttttaagttttccttataaaaatgcaaaaaggtgttctaatagatttttcttatttgggggaaaaattgtatcttatatcatttttctaaaattgcatttcatcataaaatagtcttagtagacttgatttggttatgtcatatgtcaaatcatatactactattagggagaaaatcttttgaatacccgttgcaaagtttatggctgacactgctataacaaaagacagattaacaagaaaaaaatgtaacaaatgttttacttattatttattttttaaagagatggggtctcactgtgtggccctgactggtctcaaactcctggtttcaagcagtcctcccacttcagcctccctaggagctggtattacagatgcatgccactgtatccagctaacagattttttaaaaaaccagttttacaggcagtggcagtctgatagattttcctggtttgcagtctgaatgtcacaaaggttgtctacacatgagttgtgatttmtctgaagtttctatcaatttatccagccacagtttgtaagacttcaggaaaagggaagttttaattttagtaattccaagtcaargaaacttgggagaaaattggaaacattagtttggagagctgtagctagatattagaagaaaccggaagaattcaggattcatttcagtttgtaggtaaataacaaaacttcaaaaacaatgtgctgggatctaataataggtgcactgtagttttcttctaaaatgtaatttttctttctacagtcattctcatttttatcaaagataatcaaactaatttgtttgcaaaacaagtttaatcttattaaacttagtgatatggttcggatctgtgttcttaccaaatctgacgtggagatgtaatccccgacattggaggtggagcctgttgggaggtaattggatcatcatggtggttggtccttctcgaataggttagcaccatcctgtctgtgctgttcttgtaatagtaaatgagttatcatgagatctggttttttaaaagtatgtcgcatctgcccccttctctcttccttcagccacgtgaagatgcctgctctggctttgctgtaaaaagtaaaagctctctgaggcctccccagccatgcttcttgtacagcctgccaaactgtgagccaattaaacctcttttctttataaaatacccagtttcaggtattactttacagcaatgtgagaacaggctaatacacttaacctgattatttacattatgtgcagcataggctctttttaagtctgctttgctggaacttttcataaggagtctcagattggatttgtaaaagcctctcgagactagaaggccaagccaaggactcttcataagactttgcattcgtagagatgaggtgaattcctgtttgaggtccccaagtatcctgaggttcctrggccttccaagaagtagcattccttactcacctagctgtaaggcaaccatacaaccatgtattcaagttaccaggccagtttttttacccctaaggggcttttattggctccataaagtcaaacttagtttcttaaagttatttggttgtatttgaaaataagacattctagtcaaagccttggtaatataagcagtaaatacacaatttcctgttacaagaacagattcttcctgaacttgtacaagtaactatattgtataaaaataagaatacttgcttatagttcctggattctagaaggattatgcagggggagaattttttccatttttgtttataaaagtatactttgccaaattgctgtaagctgtatagatagcttaaaagaaaagaaaaaagaatttccttaaatctggaaaacaaaacattaaagacccacaatgtttcaaacaacaaaaaaaaattatcctcattagttcattcaccctcatgtaattcttgttctgcttgattttgatgagcagtttcacgaacccattagtttcttcattcgagttctggaaattcttatgcagtccaatggtataatctgaaagttaccagaaatctgtgttacagagtacttgtcagtctttttcattaatccccttgaagatgaggcaacttagactattgctcactgcaaacactttgagagaagaatcaaaatatatagtaactgtcttatgaatgacagaagatttaaaatggccgtggttaaaagtctgatgagcgttcattattataatgatgcagttggcaaggaagttcggcagttttttggtatacaaaatgttaacatactagccagaattatgactgatagcattacaccagaacatatcagaatttttgaaatgtcaatttatggaacactcattaataatatactcatagataataattttgagaagtctaaacatcacttattatttgacagttcttcccatataatttaacttatcaaatgagcctaattaatatctccaacagattgagagacaaatcctttgagactttccagggaccctctggaaagttccaaaatcagaggtttaaaagacataatttagaattttactttaagaagtaaaaaatgtcaaaaggtttaaagcatttgattaaataggcccatagggcactgtgaaatattaccaaagtgacaaaagattttaaaggcaaacacagaaaactacatagttacaaatatgtggagctaaataatgagaacaaatggacacaaagaggggaacaacagacactggggcctacttgaggtaggagggtgggagaaggtagaggrttagaaaaaaataactatcaggtactatgcttagtacctgggtgatgaaataattgtccaccagactcccatgatatgagtttacctatataacaaacttgcacttgtatccctgaatctaaaataaaagttaaaaaaaaattatcttgataaaacacaaaatctttgtttatttggccagttacttaacagataaaggaaaaccttcactttcttaaaccagtactccaggaaaactttgtcattttaacagagaagaccaaatttctagttttgcatcagtgtactattaatactatagctatagctaatgttaataaaactatgtaaatgaattcattcagtctcagccatctttgaccacatgagataagatttttttcccccaagattccttttccataagccttttttagtcttgaaacaaatatccaactgctttctcttcctgcttttttctcttattctggcaaaccagttattttactttagcacagaattaatttactstcttttttcccataatggaaaatataccctcatgctttagaacttctcttaccaaaaaatacatcctttattgcattttttttgtataaaagttgtttctcttcacccttcttaatttcttgtagcttaaactatatatatatattagaattttaatacttagcaattgtgaattgtcatgtaataatattctgtagattaatactattatgatttctagaaacatgcttccttatagtacaatttctcatttttattaacagaccaaatatgtttagctactctatagtgtataaaagcaatattccaaaagtatataaattcaaatttatgttcagcaattaatgtttcagcattttattttactaagaaatgacctagacakttaatgaatatctgttacttaatcttacttaagtataactttaaggttgcaagttaccaaaaagattttggaacctctttttaagttgacatcttgtataaaatgttattattgaagagttcacttacaaatttttactccagttatatttatttaacttgttctcaacaattaaactgctcatgacaacttcttgagacattaaacaaagctaagcatcattttatttttctkgtttaaaaatcaggcagttataaaaaatatcacagaagcaaagaaactaaaaagttaaactttgtttaaacttgtttcttcctctctctttttttcttttgakaacagttacctccctgaagtttgtatttctaaaagataactattgagttcaagagaagacaggtaggaaatttacatctcaaaggcacagaaaaagaatgtaagttttttccagggaggagttttataacatatttgcctattatcaaatatttttcttatggaggctgtggatgaaatttttaggtgagttagtgactgaggaaacatctagcagttgtcttaccccagagtccatctaagtgaacaaaacatccatttctgttttcagatagtttttttttttcctcttctcagcattacgtggttgcttttgggagaccttgaatcccttgagagtaggggtacttaaagttcaaattactgaggggctgaagtggaaagtgaaggattctggcaggggtagacggaaggatgttaaagtaggaacttgaaggggaacatatcaagattcaaagttactttatggaatatcaaaaggaggaaaggggagcagaagaaaatggaagaaaaaggtccagaaggaagaggaaggagccagtgtgggcagtatcttggtccatttgtgttgctgtaaaggaatacctgagactggataatttataaagaaaagaaatatatttggtttatggttctgtaggctgtgcaagaagcatggtgccatcatatgcttctgatgaggccttcaggctgattctactcatggcagaaggtgaaggtgaaccgrcttgtgcagagattacatggtgatagaggaggcaagagagagagaatgtgtcaggctcttttaaacaaccagctcttggaggaactcttgcagaaactaatagagcaagaactcacccattaccacaagggcagcaccagaccatttstgagggatctgctccaatgacccaaamacctcccgttaggccccacttccaacattggggatcaaattttaacatgaaatttggaggagatagccctttccaaagataggcaaaaagaaagaaaagactttgttgctatagtggttatggatctccagtttcccatggaatatgacatgcctgtaatcacacacacattaatctgtgacattaaccatatgactgaccagctaaggttgagatgacagaatccccttaaagaccgggacctttattacaaacttccctgagagctggtgtggttggacagagaatgtcctttaaaaaaatgtttgttattttcttgaggacagagatcatgttttcactgttgctcattgtgttcagtgtctaatatgtagtaagtgctaaaaaatacgttgaataaatgagaaacattctttttgttgccgaaggtaaccacttcacatatgttatttagtactcattttggtatagcaaactgatttcatacatgatgaaaaaggagtctattaatttgcccaaagttgagaactgggattccaacccagttttgactcagccctttgcttttagccaaggctttcctgctcagaaggatctaggagtggtaaaaatagtttgtgagattgaaaaacatgtctctaattattagttttgtactccttgtatgattagtagcatcatttgcatgaactatttctatcatattatccacagcagttcattcaaactacacttttggctcaatgatagttttgcccagtatgcaaaatataacagatgtcacattccaacacttgattcattgcctggttggactccaacatcaatttgttactttaacaaacaaacaaaagttggttctaatggcacaactcaaatttatttttatgttttttattgtatctgaatctatatggcccctaagtttttagaagtgtttaagttcttccacagtaagtaaatagatatgataatgctatctgccaactctttatattttttaaactgtaaaatttattttgtaaaatgtccttatttatgaaacctttaatgagtttcttgctttaagtatctgtgggttagttgaaagaaagtttttattacaggtctaagacttgcttttctttgaacatcttttatggttgaaatagaatgtaaactcagtcatcaaatttagattagttttagctgtaaataactaatagtctgcggtagaacaagtttctataaacagtatttttaatgtttcaatatgtgctctactaaaactkttcagcattgatccatactaacatgcawtttagtgaacttactaggaaaagcatgataaaagttttggcttttctgggcgtactgagagatctagcaaaaatgcatcccaaagtgcaaaaaccttacatttatttctcttcatgacaagtgtaaactgttaaggttaagtgggtggggcaaccggaagtaattactaaggccagtggcatttttgtggtttaataaaggcagaagctaattattcagtttttatttaagtgaaatggtgccaaaaaggaggttcctgtggagcagctgcactccttcagtgttgccctaatttaccaaagacacaactgtcacaaacaaaacttttaaacttgatatatagccacaaaagtaaggaggcttttgttgggagtgcatgcagaagaactcctttatacaaatcaaccggcagatgacggacaatgatgaaaatttgattctttgaagtcataatagtcattgaaatgtgtgaaattctggtattgaaaagagagcggccagcaagactctaaatcctgggtggttgcaagaagcttgctgggaggtttttctgcattttgacaccaacttcccattgcttgttccctgcttcctttgttaaagaaaaaaaaagttgaaatcacagaagataaatggagacagttgataaccgaatcatacagttttaatatggaaaactagtattttatcatggaaattggtatttgaaagaataaagttcatatacatatactggtacattcatagtgattttttaaattttctcttcatttatgtagacttgtgaaatggcaggtcagctatcatctcctccaaaatttaaaattgttgaagatatggtgttgaaagaatgaactttggaattatgacatgcatctttccaatagcaaattttgacttgaatgcccttaatctgtgaattatcattgacttattagttatcatttattaaaatagcatattgcacataaggttgtatttctgaaactttattaggataatgacattaataatggaagcataggtttcatacttgacccaactattcaacaattaagttttaaaattcaataaatctgtgtatattacttatagagtagcttgttttattagaatttacagataattattaactggtgagtcttgaggttcttcaggtgccagcttgaaggcttttcatacctatgtgatttagttttttgaattattatttataaattatttatctctattttaccagtaaaataagaaatttgtaaaaggcaatagtgacatctttctccaaagcatttctagcttttctaaataggtttcaaaaactcacaggtgatccatattgccatacaaaagtagaaatccataaagaatacaattagttcaatataatttaaatagtttgcggattttaaatttttttgtgaaagttagatctcaggtagctccgtgtgaatttagagggaaccacacaaagcgttgaagacacaagtagagttcagcatagtgcctcatagttcttttcaagtgttacattgttttaatggaatcttggagtgggagctttagcccattgaaatgtgcttaaagaacaggttcttctgtcactagccgaagctgtgtggatgaaatgataacaatagggtgtcgtgatgcatttttaaagtgtgagaaatcaggttgtctagactgagagtgtgcctacagggactaggaattttagagcctctgtaccctttaggtgtcaagtatatgagagatgccaagcctctttattctgtctttggcagcagctcaattgggctgtagtaccttacatgtcttctgcatgcaaaaactgattctgtgtcatgacaacttgggttcccaaaatcagaaacccacttgttcaaatgccaactttaaattagggtaagataccaataaataattgctgtaattcgagaagacatggaagattggtagttatgagttcaaaatataaatagcttagcaacattgtgtagacactttttaaaaaaggttttctatatactgtcctttctactttgtagctcaaatactgttttatagtataaatcaagaaatactatttcaatttttttcaaaacttgaaaaagtttaaaatcttaagttttttaatcactttggcatatatgcatcacagtayagaagtaggtaaagtaaaagtgtttcctctaatcttcctgaggtaaccagtgttaagagtttaatgtgtttcctttcatatagttttaaaaatagacataacttacagctccagcttttatgagctcagctcagaacagaggggatgctttggaatttggaaaagatgccccaccccataattctataacatgcttatagtgtttgtttatacccagcttaagctgtagctgaggaaacgagacagattaatctaaagatatataatattaaataataaactactatggcagattgcaagtattacagtgaattcaaaggaggaattaaacattgaggacttcccaggagttgagccactttaagctcttaaatagagaatatatgcttcaggaagtcattaaatataataatacttaaactttttttgaagttgaacctgaatattagaaattaccaattaaagtatttcacacctttaaaaattatgtgccagcttcactcatttttactttaaactagatgtagggaaactttaaaaataagtaaatgtaggcacatattagaagtgcatatttgtgtaaatatttatatggataattttgatagtttctgtaaacaagctgtgacaaagtagccacacctaattattgacgcaggtggaaaggtattgtgttaaatagaggattggttgccaactaaaataactttaaagaattggtttttaatcttgtggatagagataatagtcaagtcagaaatgtgtttcgtgtttttcccactagtacgtactagctaagaatacttaccagctaagtattcttgccagttatttggttcatagcattgatagattgaaactacaaataaacattagtcttcattagggtgtgtattataatgacataaaaattcacagacgttttctagttttcacaaatttggtataatcatttttatattaactcttgtttttaccaagttatccaaaatttacgttagtaagtgaaccatgattttaaaatgcttcattaataagcatatggttgaccccaatgtgatttactttgatcagataaagtattttaccattactaaatggagatttaacccatttatgtctgaggttgcagtttttagaatttttgcwatcagaccttggcaatggccttgagcagtaggatataaataactcccacatgcttagcattccaataatggaacactaggaataaataagttttaaactctgaattactttactaatttgtgtcctgactgctactatgttttgataaatgtatctactctggggcatcaaaattctgtgcattttcaaaatgagcatttgttactggataaaattatagaaaaatcgagttaaagttaccattgttttcatctcacattttggcaaaaattatgccactttttgggattacttttgcagaatgtgtttgattgtatcattctctctttagtaggtttcaccaaaggggggagatacatcacaatgctaattaaagttgttaaatttacarctttacaaaaaggttcaggtttccctctcaaggtaatgccttgtgggtaagcaatttgacacagaaattataagtaacagattgtcttctatttaagatttaaataaacatgcaaataaggatttactttttatatccccttttcatatttcctttgtattttttctcctctgactagttcgcacttgctcacaaagtaagagcattgttgactacaggctcttctgcgagcaaacagtctcttcagaaaataccaatgctttgttggacaaaagggcgtaaattttttttacratccttttccactgtctccactacgtccccctaaataaaccatttacaggtatctaaatagtaatttacrttgtaaagtatcagaatggtagtgaaataagccagaaaatttatctcaatttatgaacaaatctgaatagagttgcatgaatataggaaacaacaaaagtacattagtgtgtatgtaggctgtttgaaacgtgtttttttttcttgtttttctgtaggatatcactactttaactggmgttccagaagagcatataaaaactagaaaagtcaggatctttgttcctgctcgcaataacatgcagtctggagtaaacaacacaaagaaatggaagatggagtttgataccagrgagcgatgggaaaatcctttgatgggttgggcatcaacgtgagyactttattttaatgtgaatattgtcagctatctttttctatgtagatctttcttctaaatatgattttcaaactcttttatgtacaatatgcttatgacagtactttttgacgctgttaagtaccactgtgctcaaagatacacattatatatttagatattcagataagtgtggcttagcacagtaaactatgacatagtctttttcagagtactacttaytagataaaaatgactgaatttcagagcactgttatggaactcaaagctatgtatacagcagtcccccccttatctgcagttttgctttctacggtttcagttatccgatggacagtacaataagatatttcgagatagagagagactacccttaatataacttttcttatagtatgtaagtgttataattgttcaattttattacaacttattgttaatttcttactatgcctaatttataagttaatcataggtctatgtgtttaggaaaatataggatttgatactattcgtggttttaagcatccactaggggttttggaacttgtcccccctcagataagggggaatactgttttatccaagatactgtaagaatggtgtttataatatagtgacactttaacttgttttaaaattacaataaacttctttgtaatatatattatatatatatcttttttctttgtaagggrggtaggaactaggtcaatttagaaattagctaacttgagggaaacttataagttcctgagatattgtgattaataataaataataataaattacttttaatttttatttattattttctttagagatgkggtcttgcccccttgcccaggctggagtgcagtgatgtgatcctagctcactgcagccctgaactctgggatgatcaagcggtcctcccaccttaatcccccaagtagctgggaatataggtgcatgccacagcacctggccaatttttttttatctttttgtagaaatggagtctcgctttgttgcccgggctggtctcgaactccgggcttcaagcgatccacccacctcagcctcgaaagtactgagattacaggtgtgagccaccatgcctggccattaaattgctttttaacagtgtattggaataaattcttgtggtactaatgaagtcagtgacctaattctccataatggaatagggcccaaatgttaagtaggagggctgattctagttaaatttaaaaagctgtcattagagaaaacattaggcagataagctagaaaattgtcattcgtattgaaactctgagaacattatgtccggtctccagttgaaggtagttataaacttaaattagaaaatgtagactgtcttgttctagaaaagtataatattcaacatcattgcctgttgattacttgggagactttttttagaaaacatctgtcatgttgcagtttaaatagaattatattttattaggcaaatgatatataggcacaatttcttagtttttttcttatgttgcagtttaattaatttattaaaatgagaaaaaagtcaaacaatacaaattcaattagaacatcacaaaaatacaaatgtacttccacagatctacaaatttgttataagattagttataattcagtgtgttataaaattaagagaaccaaaatgaaacactttgctaagaatattctgctttatcaaaccacctaggtagagtcttgagcactcactggtaataaagctgagaaatagatacttacccaacttagtctttggagtgaatctgtatatgtgagatgagccgccatgtcatggttataaggaagggatggaatcggctcatgtccctcaaagcccataattgtcatgtctcctgtagtagtagtacaagacctggcctggaaattgttagaaaggggaactaccaaacagaaaactgaatctacccagtttctggaaaacaacagatggaggaacatttggcttccaaactttttcatatgtaagataattttcctaagtaatcttgctctaatgggttgtatattctcagtacttgtcaagaaaacagaagtctcccattaactctagcttcaaagaataaataccaggtcagatttcccaatgcaccttattgtttcaagagattcctggtggtgcctgcatctgtaagaatggtcatatacagacaaaatcagtggttctcaactgagggtgcttttgtatccttaaaacatttgccagtgtgtggagacattcctggttgtaataagtggtggcttctgctgacatctagttaataatggcaatactatgagacacaggactgccctcctttgcaaccaagaaaaaattttctggccccccaaaagtggaagatgctgaggattaaaagccccagtatcaaggagaatactttgagaccatttttttttccttacaaaaacacaatatccccaccaatgtgagatgttrgatcacatttttgtacaagggtggttgtggtaggtagaattctaagatgccccaggatatctgcttctttgttacaactctaatcatcctcttccataaggtatggctacatctgtgacttgttctagacaattgattatggcaaaggtgaggggatgctctctggcaattacttttccttatatcagaaacaataggaatctatattttctttctatcttgtgtttgytttcataataaagtgatctagagtatccccctgttcatggaaattttgccctttagtctaaggcccttcatacataattgaatattgttcttttttaaattttagatccagggtgtacatgtgcaggtttgttacatgaatatattgggtgatgctggggtttgggcttctagtgaactcatcacccaaattaagtaaacacagtgcccagcaggcagtttttcaactcttgcccccttctccctctcccctctattggagttcccagtgtttattgtttccatctttacgtccatgtgtacccattgtycagctttcacaaatgagaacatgcagtctttgattttctgtttctgcattaattcacttaggatgatggcctccaccttcatccatgttgccacagaggacatgatttgattcttttttattgctgcgtagtattccatgatgtttatgtaccacatttctttatccaatccattgttgatggacacttaggttgattccttgactttgctattgtgaatggtttctttttgataaaatgagttatttttctttgggtagataccaagtagtgagactgctaggtcaaatggtagttctgtttttagttctttgagaaatctccatactgtattccataggggttgaattgctttacattcccaccattagggtataagcatttccttttctctgcatccttgccaacaatagccattctgactggtatgaaatggtatttcatggtagttttgatttgcatttctgtgatgattagtgctgttgagcatttttcgtgttcattggccatttgtatgttttcttttgaagagtaggtgttgtgttatcctttttattttatgtttcatataatatatagagtcattttgtaaaccacatgcttctagaagctgaaggaatttataaggaaaaaatttgtcccgatccagtgattgaaatgttaatgattactgtttttcaatcacatgagatttttacatgttcatctattccccagactcaccgtagtaatacattcccagcaacattcagtaataaatgattatttgartacttgtgccttgtatacgctaaattgttgatgagtaaaatactttatataagaatatacatttgagtggtatagaggagaaaaagtaatatcttcctcacatctattgcaaggtttgtggctgaracatctataacaaaagatagtttaacaagagactagcatacaatttcattttgtgtaagttttatgtgatacaggagacttcagaaatgaagacccaaagaaacagggaaatctgtgtatttttgggcttagttttgatgaagagtggacagtcatacagaaagatggttggacaaagtttatgatctaatgattataaactaggaagaacttagccagacctgtttgttcagattcttgtctgtgtctctgtcttcagaaataaggacattccattccttctgttatagggtagacagttctggaatgagggtcttaggactgacttcagaaggtcagataattctgttatgtcctacttcaggggagagtgtcagagagaccttcctgcttctgctgttttctcaaatgccaagctgccatattttggggatagtgtgtcctggaagcgcattartggattgtttaaataaatacagttttactttgctgtgcttgcacaaaggttcacacaatcattattatagtattgcttagtctggaaatagcatattaaatgttgaaatatgtagtgatttaatactctgatgctttaagacaaaactgtaacctattgtgcataaatatggaaatgctgtttttattacatattgattgaaaatgagatatactatatgtttgggaggtaaagttctttttcmaaacgtagttttgccgaagtaaaaagttttttgaagcaatagaccttgtctgcaattggtttatctgagacattgttttgaatcttgaataattttaaaaaacattcattaattctttttgttctggtgttaacaaccagtagcatgaaaaaatataagaataaaattattatttaaaatatttacttatttgatttgattagaacagagaattgctactctttttttagcattttaatgacacaaaaatagtatgtaattttactgcttggacatattgaattctgacttctctttgtgaaatattttaaatctttttctaaaattgttagaattgtaagctgaaggtttttcatgatcatctaattaaattttatcacttaactaagaaataaacctgtgtcccagataaattaatgagttgaccatagtttgggttctcagcctgcttatattttattttacaactatatataaaatactaatatgtagaatattaaaaatataaaatatttaaaacctggctagataagtccatatagacttgtattttttttaatcaggagaattactgtatttaatggagcaaagagaatgttaatattttaatgtgttttttgctgtgggtcaaagaatgattttaggatgtgctaaaagagaaatgactatccatcctatacctagaatatatttgtttccaaagccacaaggtttcctaatttaggggatcttgggcttaactttattcttttttttttttttttgagatggagtctcactctgtcgctcaggctggagtgcagtgggcgatctcggctcactgcaagctccrcctcccgggttcatgccattcttctgcctcagcctcccaagtacctgggactacaggcacctgcaccacgcccggctaattttttttgtatttttagtagagatggggtttcacygtgttagccaggatggtctcgatctcttgacctcgtgatccgcctgcctaggcctcccaaagtgctgggattacaggcgtgrgccaccgtgcccggccaactttattcatttcttctgatagatactgtctaggtctatcatattgatggaatggcttggagggtttaacagacatctaaccctgctgatgtaagagtattacagagggttggaagtgtgcagtataagaaatatgacaaatgtaacacctgcagagattatttttatatacctttggaagggttttttttttctttttttgctatcttgctgttaaatacacaggaaaggacatatttcattgagcagcagaggcagtgctaatggaaaaggtaattttacaaagttacagtaattttttaattttacagtaattttacagtaatttcacagtaattttgtgacagaaatttgaaatcttaaatgttttcccatatgttttcctcagtggggattgaggggaaggatcctcattgtgaaaatgggcttcatgactgtaaacatggttttattttttaaaaatatagtgaatacatttcattgttatctgcttatctacagtattttttgaaaggccactttggttcacatgtaggattttaagataaatgtgtttgatctttgtttttagatttctaaattcatattttaaagtactatatttacatttcttttctcatccaaagtggagcttttcttatgctcttttaattacctgagtctttaaatgttagaactcaaaggtaaaagatttatctttgtgtaaatatgaaaaatatcttaaggtgcaaaattatcctttgggtttgacccaagtgtttttactttttaaatctccttgatcctgtttcagggagacagcatgacttatccttgtttaatattgtagcaagttgccaaagataactattggttattaatctcttttttttttttacaatcttttatcttttaggttagtaaatgcttacttttcatttatttctgtaagcaggactttaattttgattaaacctaaaaatgatttatttttcctcagctgtattaatgtacattggtcattgaaactcagtgatcattggactcagtactttttgtgttaatcacattctgaaaatgtgacttctgtgttaaattttwaaaatgttttttttgttagaaaattatgaatctgtcattcagcttctggaaacaaggatttgttccatgtcattgtggacatagaaggtcaaatagtttaagcagacatgtgcacaaacgtagatgttgcgaattctctcatcacttgatcctcaagccttaagtcatcaaagtggacatcttaggttggcagatagttcttttgattatgagtaagtagcaaacagaagcattgcctgtatcatctttcccctttacactgttctaacacattgccaaagcacttctaaaatttgctttaatcaggtggttcagtttttttaattgaatttaaataagaattctgtctacttttcatctcattactgacttttgaacaagtaaatgactgtgcttgcattgtagatttaaactatagatacatgtttccatatataacatataagcgaggaatgttaccagttactccttttcctcccctgcttactaccctctcaccagtatacccgccctccctccatagaagcccccacaacaatttggtatatatccttccagacttttttcagtgtatgtatatgcatatatttaagtttatatgtcctttggtgaaatgtcatgattttcttagtataagtttttcacatttcttattaaaattatgcctagatattttagttttatcactatttcagatgaagtttcttcattacattttctagttgagtattgctaatatttaaagttgattttgcatataagccacattatgtactgtctctttagttgtcatggtttttcaagggattcactttgattttctagttatataatctaacaatagtggcagtttgttttctccttatagccaatttctctttcttgccttgttgcattggctagaatttgcaaagttgagtatcattcatgatattcaacatccttattccctttttcttctttagcagaaatgtttctgatataataaaatggacaaagttcttttctaatcttgatctaccaataattaaaaaaaatcaggaatgggtattaagtattaatgtttttgtaacatctgttgaagggcattttctgtagtgaatttcagttacctattttctgatccaattatatgttttataattggatatgtatttactatttttaagtaatatgtatttgttaatatgtatttaacatttttgcatccacccaatctgtggaattggcctgatgcagggtggagggagtgtgcacacataacttctatagcagaatataatttttttttgctcagctatttggcatttcttacctcagaaatattttaaaataacaaaagtgtttattaaaatattggttttaatattacatattttttctctacggtcttcattatgtatrtctcctatttgcagaaagatgaccacctgatatttctgaatggtgctaatcaaactaacagcatttagagccacttataactgctactgatacttaaactaaaaaataaacaaataagctaagcttcccgagaagaaactcattcacttgccgttctgtgccattcagagggcatctaattaaaattctcagtgccaaaatgtttcaccaataccttttatgcatgaatagttctcttaggtaaatcaagagtcagttataatgctaatttttacattgtattgatacttagatctgttttgaataatattaaataggcttkgctcataagcagaaaatgatcattgaaattcacaaatggtaagtatcttcacaaagtctgttttatggtgtagaacaaaaagcaatctgccaaccaatgttggacattataattatgaaacaatttttgatattttattggtttactgatgttcattagtgtctagtaaagtatatgaaaatgatattggaggaaaaatatctaaaatcaaccttggaaatgtgtacaacgtattattttgccaggcttaatattgctttttaaactttattgaaatatacattaagaaaagtatacagatcagaagcatacagcttcatgaatttttacaaccggaacacacatgcatgtgagtagtacccagatggagaaacagcatttccagtatctcagaagttcccatttcatcccatgcttttttcagatttcagccttccagaggtaaccaccgttctgacttctaacaacatagattagttttgcctatttttttttttttttttttacttaaagagaatcatcctttatgtgctcttttgtgactggcttttttgcttaactttgtgagattcatccattccatgctatttattgatggttatttgtgtaaatttctgtttgggtttttatgtataatacagtactaaaatgaagaatctcgtatatatcttttagtggatatgtggctttctaatatgctaattagtccctgaaatattagtcactagttaatattcaaacaattaatatagagataacaataatctattaattatctgatcccttatgtttctcaagttaatgacagtagcaacttgataagttttgttccaacagacagttaaattactgatagatccaccttgaacttgtggaggattatgcatcattggagtggatctgtttcagttttagccttagtcttggaacctagtgttaaaaaataaaaaggcacggcctttctgaagttttgatggaaagcacraggtgtttacccacattctcccttcagactcagtctcccctgtaacaggcagctgctgaaatctttgctcaattctttcagccttcccagcttcattttgaaaccttgctgaatcatgtacagttcaaaagctccctgctctgtggatactctcttccagctgctctggcaatcctggactccgtctccaggctccttgcactgagattacggctttctgcttgagttctcgatgctcctagcttgtctagactagagaataccttatgggaaacaccgtataaagttggatctaaatccaactttagattggttccttttttttaaagattgaattctctagaagtttatttttttttttctattagtcactctctggtctctgaaaattatttttctgttttgtccagagtttatagttaggcagataaatctgatataatattctgccattacccaaattggaacttcagtaattgagaaatgagcaaataaagtctaaaaataaaagaacaaattatctttagtggaccaggttgaaagagagattgtatacagttggaggagggtaggatatgaaagacttcatggaataggttggtattcaaagtgaagcatgagggattatttggatggacttccatgtgcagagagtaggagagcatttcaagaggaaggaacaaattgaactgatgggaaagtacaccttgcatttataaaaacaattagcaacctgatttgactagttggttacttctcaggggagtaattaaaaagaaggctagaaagtagttctgtccatattatagaagtgcttaaatgccaaggtagaagactgaagttaatgtgatagacagtgaaaactgtttgaaatttttgaactgggcagagagtgagtttgggatttgaactttaggaagacatcttggtgaagggtggattggagtcaaggaggcagaaagattagttaggatggggttatgggaataatgaaaaagagcttaaactggtggtgacagcatacctaaaaaagaactacaaaatacaggaaatgaaggagaatgagaagggtagaaactgaatggctggaagaatagyggcttcttccagtggatgaatgttgttactattggatatattggatataagttgttactatttgatttctatatgtatgtattcataaataaagtgaggataataataaaggctataccatctttgcaggaaacagagttctgatctcctggcttctgtcttgtttcttattctcaactaagccaatgtgcctgtcaacacttatcagattactgcatcatatttatgttgatacttctgttctcagtatatatastttaactatcaactggaaaatcgtgtgcgctttgaaaaggaggaaccaatataaaattatgatattattartactaatatagccagccatatgaagctcttttgcttacaaagggtaggggtgggttatgataagaatatatataattataggaayctcagagtagcaaccatggtctgtgaccagaacattggcagcagtaattagtgggtcttcccgtcagtgagaggtactccccatttattctcttctttctatatctcatatctttccccatccaaattaccttttgaatcctcctttctatattttttacttccacatttctaagcaatgtttcatagaatgctatattcacctctgagagattcacaataaacatttgtagcaaacagtgttccaccttgttataagaataaaagtggggtgggcacagtggctcaaacctgtaataccagcactttgggaggctgaggcaggtagatcacttgaggtcaggagttcgagaccagcctggccaacatagtgaaaccccatctctactaaaaatacacaaattagccaggtatggtggtgcatacctctaatcccagctacttgggaggctgaggcacgagaattgcttgaacctgggaggcagaggttgcagtgagcccagatcacgccactgtactccagcctgggcgacagagtgagagtccatctcaaaaaaamaaaaaaaagaataaaagtgacatttcttgaagttggatttcctaaagagcctatgtagatttgtaaacattaacactgtcctacattgaagaattcaattggatgtcagatcttagagctttatttttttatgctttaaaagaatattgttaatgatggaaggtttgtcaggagtgagcgatcttcaaaaaggagactcagaagaagttaatttaaaaaaagaatgtgtattgttgcattttcttgagtaatgataggactagcaattttacacatcagtaatcttgatagtaaattttaatttccatttaagaatcctcttgggttttaaaattcatctcaaattgtttttttagagtggaataaaattattaaagactaacaatgcctttgcaattatgaattttattatttgacaatacatattagaaaatctcccaaatttaacacagaaaaaggtattccaactaacagttttaaagaaattattacaaataaaatattccatcaataatrkacttatttgattttatagtagctgtttattttamatattgattttgtttctcagctaaagcttaatgttaaatcttggaaaaaaatttgtttcttacagggctgatcccttatccaacatggttctaaccttcagtactaaagaagatgcagtttcctttgcagaaaaaaatggtatgtttggtctgtttttgacaaagtcaagataatgattttatgttcttaaccttaatkaaaaccaattaagtatacagaatttgagttggaatccagtggtttcattgtatctaatccagtggtttcagactttaactacatcagaacacccacctccaaaaaaaaaaaaaaaaaaaaaacctaaattggaatgctcatacaacatgtaaaagacagactgctctaatttgaagtaccaacagggaatgaaactacttaacgcctaccttgtgtatgaattcctctgtaaaattactaacattttgttgaacttcaattgaacatatatggcagcctattctagttttgacacctctgtttaccgttaagttctttcagccaaacgtaatgccaaaatctagtctattaatctatttaataactcaattatttgaaaatattgtcttattgcctgtaaaatttcccttcagtctaaatgcccacatttgctacttttctagatatagtgggcctaataccaagcctaatctcaactgtataataatattaatgtggcctaagagtatatttgcttttggggcagccacctaacatcattgggttatgttgatcttgctatcaacaaaaatgcaaaatgtcttcctttttccttattttctgctgttaagccaacatagtatagtgaaaggaagttttgcagtcagactaatatggattctaatcttggttatgccactttgaagctatatgattttggattaatttcataatggacttaatgtttctcagttgaaataagggtacctacctcatgaagtgggtgatagctgatacataatagatgttctgcttgatacctcatgaagtgggtgatagctgatacgtaatagatactacttgataactattagttctgaccttcacctccctccagccagtatttctgctgtttgtcttccttagattcaaatgcactactaaacatttgtacctaatgtatcctgttattctagtttctcaaattgaatttgtctctttaagtgcattgttactgtaaggcagtatataaaaataagaaattagtgttctctaacattayctgaaatacaaatgtgaaagcactataaaggttataatctaacatatttgcttttctttttcacctagtattgtatagcttatgattaaaagtctgaagtcaacctatctgcctttgaatctgtatgtcactacctgtatgactttatacttctatttcctcatacgtgcaatgagaattgctgtggtgattaaatgagttaataaaagtgtttagagactagggtctgacaaatactatatgatagtatataagtataccctattctgttattaatagactttttttttatttaagttttagggtacatgtgcacaacatgcaggtttgctacacatgtatacatgtatacatgtgccatgttggtgtgctgcaccgattaactcttcatttaacattaggtatatctcctaatgctgtccctccccccaccccacaacaggtcccggagtgtgatgttccccttcctgtgtccgtgtgttctcattgttcaattccccacctatgagtgagaacatgcggtgtttgctttttttgtccttgcgatagtttgctgagaatgatggtttccagcttcatccatgtccctacaaaggacatgaactcatccttttttatggctgcatagtattccatggtgtatatgtgccacatttgcttaatccagtctatcaytgttggacatttggcttgattccaagtctttgctattgtgaatagtgccgcagtaaacatatgtgtgcatgtgtctttacagcagcatgatttataatcctttgggtatatacccagtaatgggattgctgggtcaaatggtatttctagtactagatgcctgaggaattgccacactgacttccacaatggttgaactagtttgcagtcccaccgacagtgtaaaagtgttcctttttctccacatcctctccagcacctgttgtttcctgactttttaatgatcgccgttctaactggtrtgagatagtatctcattgtggttttaatttgcatttctctgatggccagtgatgatgggcattttttcatgtgtcttttggctgcataaatgtcttctttkgagaagtgtctgttcatatccttcgcccacttgttgatgaggttctttgtttttttcttgtaaatttgtttgagttcattgtagattctggatattagccctttgtcagatgaccagattgcaaaaattttctcccattctgtaggttgcctgttcactctgatggtagtttattttgctgtgcagaaactctttagtttgattagatcccatttgtcaattctggcttttgttgccattgcttttggtgttttagacatgaagtccttgcccatgcctatgtcctgaatggtattgcctaggttttcttctagggtttttatggttttaggtctaacatttaagtctttaatctatcttgaattaatttttgtataaggtgtaaggaagggatccagtttcagctttctacatatggctagccagttttcccagcaccatttcttaaatagggaatcctttccccattgcttgtttttgtcaggtttgtcaaagatcagatacttgtagatatgcggcattatttctgagggctctgttctgttccattggtgtatatctctgttttggtaccagtaccatgctattttggttactgtagccttgtagtatagtttgaagtcaggtagcttgatgcctccagctttgttcttttggcttaggattgacttggcaatgcgggctcttttttggttccatattaactttaaagtagttttttccaattctttgaagaaagtcattggtagcttgatgggaatggcattgaatctataagttaccttgggcagtatggccattttcacgatattgattcttcctacccatgagcatggaatgttcttccatttgtttgtatccgcttttatttcattgagcagtggtttgtagttctccttgaagaggtccttcacgaagtcccgtgtaagttggattcctaggtattttattctctttgaagcaattgtgaatgggagttcactcatgatttggctgtctgtctgttagtggtgtataagaatgcttgtggkttttgcacatggattttatatcctgagactttgctgaagttgcctatgagcttaaggcgattttgggctgagacgatggggttttctagatatacaaccatgtcatctgcaaacagggacaattgacttcctcttttcctaattgaataccctttatttccttctcctgcctgattgccctggccagaacttccaacactatgttgaataggagtggtgagagagggcatccctgtcttgtgccagttttcaaagggaatgtttccagttcttgcccattcagtatgatattggctgtgggtttgtcatagatagctcttattattttgagataagtcacatcaatacctaatttattgagagtttttagcatgaagtgttgttgaattttgtcaaaggccttttctgcatctattcagataatcatgtggtttttgtctttggttctgtttatatgctggattacgtttattttgtgtatgttgaaccagccttgcatcccagggatgaagcccacttgatgatggtggataagctttttgatgtgctgctggattcggtttgccagtattttattgaggatttttgcatcgatgttcatcagggatattggtctaaaaatctcttttttttgttgtgtctctgccaggctttggtatcaggatgatgctggcctcataaaatgagttagggaggattccttctttttctattgattggaatagtttcagaaggaatggtaccagctcctccttgtacctctggtagaattcggctgtgaatccatctggtcctggactttttttggttggtaagctattaattattgcctcaatttcagagcctgttattggtctatttagagattcagcttcttcctggtttagccttgggagagtgtatatgtccaggaatttatccatttcttctagattttctaatttatttgcatagaggtgcttatagtattctctggtggtaactaagatcagttctgccctgatcttagttatttcttgccttctgctagctttttgaatgtgtttcctcttgcttctgtagttcttttaattgtgatgttagggtgtcaattttagatctttcctgctttctcttgtgggcatttagtgctataaatttccctctacacactgctttgaatgtgtcccagagattctggtatgttgtgtctttgttctcgttggtttcaaagaacatctttatttctgccttcatttcattatgtacccagtagtcattcaggagcaggttgttcagtttccatgtagttgagcggttttggtgagtttcttaatcctgagttctagtttgattgcactgtggtctkagagacagtttgttataatttgttataatttctgttcttttacatttgctgaggtgtgctttacttccaactgtgtggtcaattttggaacaggtgtggtgtggtgttgaaaaaaatgtatattctgttgatttggggtggagagttctatagatgtctattaggtttgcttggtgcagagctgagttcaattcctgggtatccttgttaacttcctgtctcattgatctgtctaatgttgacagtggggtgttaaagtctcccattgttattgcgtgggagtcttaagtctctttgtaggtcactcaggacttgctttatgaatctgggtgctcctgtattgggtgcatatatatttaggatagttagctcttctcagtgaattgatccctttaccattatgtaatggccttctttgtctcttttgatctttgctggtttaaagtctgttttatcagagactaggattgcaacccttgcctttttttgttttccatttgcttggtagatcttcctccatccctttattttgagcctatgtgtgtctctgctcatgagatgggtttcctgaatacaggacactgatgggtcctgactctgtatccagtttgccagtctgtatcttttaattggagcatttagcccatttacctttaaggttaatattgttatgtgtgaatttgwccctctcattatgatgtyagctggttattttgctcattagttgatgcagtttcttcttagcctcgatggtctttacaatttatcatgtgtttgcagtggctggtacttgttgttcctttccatgtgtagtgcttccttcaagagctcttttagggcaggcctggtggttgcaaaatctctttgcatttgcttgtctgtaaaggattttatttctccttcacttatgaagcttagtttggctggatatgaaattctgggttgaaaattcttttctttaagaatgttgaatattggcccccactcttctggcttgtagagcttttgccaagagatcagctgttagtctgatgggcttccctttgtgggtaacccgacctttctctcttgctgccgttaacatyttttccttcatttcaactttggtgaatctgacaattatgtgtcttggagttgctcttcttgaggagtatctttgtggcgttctctgtatttcctgcatttgaatattggcctgctttgctagattggggaagttctcctggataatatcctgcagagtgttttccaacttggttccattctccccgtcactttcaggtacaccaatcagacgtagatttggtcttttcatatagtcccgtatttgttggaggctttgttcgtttctttttattcttttttctctaaacttctcttcttgcttcatttcattcatttgatcttgcctcactgataccctttcttccagttgatcaaatcggctactgaggcttgtgtatttgtcacgtagttcttgttccgtggttttcagctccatcaggtcctttaaggacttctctgcattggttattctagttagccatttgtctaattttttttcaaggtttttaacttctttgccatggtttcaaacttcctcctttagctcggagtagtttgatcgtctgaagccttctgtcaactcgtcaaagtcattctccatccagctttgttccattgctggtgcagagctgcattcctttggaggaggagaagtgctctgatttttagagtttccagtatttctgctctgttttttccccatctttgtggttttatctacctttggtctttgatgatggtgacatacagatggggttttggtgtggatgtcctttctgtttgttagttttccttctaacagtcaggaccctcagctgcaggtctgttggagtttgctggaggtccactccagaccctatttgcctgggtatcagcagcggaggctgcagaaccgcggatattggtgaacagcaaatgttgctgcctgattgttcctctggaagctttgtctcagaggagtacctggccgtgtgaggtgtcagtctgaccctactggggggtgcctcccagttaggctactcaggggtcagggacccacttgaggaggcagtctgtccgttctcagatctccagctgcctgctaggagaaccactactcttcaaagctgtcagacagggacatttaagtctgcagaggtttctgttgccttttgtttggctatgccctacccccagaggtggagtctacagaggcaggcaggccttcttgagctgcgctgggctccacccagttcgagcttcctggctgctttgtttacctagtcaagccttggcaatggcggacgcccctcccacagcctcgctgatgccttgcagtttgatctcagactcctgtgctaacaatgagcgaggctttgtgggcataggaccctccgagccaggtgcgggatataatctcctggtgtgccgtttgctaagaccgttggaaaagcacagtattagggtgggagtgacccgattttccaggtgccatctgtcacccctttctttgactaggaaagggaattccctgaccccttgcgcttcctgggtgaggcgatgcctcgccctgcttgggctcacactcggtgtgctccacccactgtcctgcacacactgtctgatgctccccagtgagatgaacccggtacctcagttggaaatgcagaaatcacccgtcttctgcgtcgcttacgctgggagctgtagactggagctgttcctattccaccatcttggctccaccttaactcttaatagacctttaaaaactttttaaaaagaggttcttaagtgcaattccttacttatactttcttggcaagttccaaatttcttaattacataattgttttcaaaagtggtcttttaaaatactattttgacttaaaataacattactctctttgtgaactgtaacatagttatgaaaaacagttccattaatttttttatcttttcagcctattatatttcatgtctgacactttgaaaattattcatttgaagtctgtcacatgagtttaataacaggaaatctaattaaatatttaaatccctggttagtctttctctaagtggtcacaaggactgcatgactacagttgccatgtgaattgccagtgtgagctcaccactgttcctattaaaatcaagtgcctttctatctgacttctacctcccygggaaagaaaaytgaggaacactatcaaagtctatagaaagtgtaactttaaaaagccttgtggttagtgacataaagttgtaggctaacagtgaatcaggaattttaacctttaagatagcagaactatgtcctatcttggtcactgctatgtgcctagcacctagcacctagcacaaaacctgacatataatggacactcagtatctggtggaataaatgactttctaaaatatatttctctgactgggcacagtggctcatgcctgtaatcccagtgctttgggaggttgaggtgggtggatcacttgaggtcaggagttggagaccagcctggccaacagcaaaaccctggttctactaaaaatacacaaattagctggatgtggtggtgcgcacctgtagtcctggctactcaagaggctgagacaggagaatcgcttgaactcacaaggtggaggttgcagtgagctgagatcataccactacactccagcctgggtgacagggtgagactcagtctcaaaaaataataaataaataaatagaaagaaacatatttctttactcaagaatttgaaaccattctcctctcctgggaaagtccttaatgattattccactcttgatttcggtatagtacttatgatctgccttatttatttaacatgtagcattctatgtccttaaatagataaatcctgtttcttcagctacagtggaaggaagatctaaataaacaccattgaagcattacagaagtggaggtggggaggccaggcgcggtggctcacgcckgtaatcccagcactttgggaggctgaggtgggcggatcacctgaggtcaggagtttgagatcagcctgaccaacatggagaaccctcgtctctactaaaaatacaaaattagccgggcatggtggcacatgcctgtaatcccagctactcaggaggctgaggcaggagaatcgcttgaacccgggaggcagaggttgcagtgagctgagatcgtgccattgcactccagcctgggcaacaagctccagcctgggcaataagagcaaaaactctgtctccaaaaaaaaaaaaaaaggtggaggtgggggatcttttccaaattccacagcatcctcttccttctgacttgcccctcttgggtaggtaaatagtagtgaaggacatgcaaatggatcctccctatccccacaactaaaatcatttgttgtcagctagtgctattgaaggttgagtgaaccgatgttctgataagttaaggcatttaaaaaaaaaaggttcagatgcactaatatgtaaagactactggattaagaggctggtaactaagactctcattccacagtggtctacatcacaggagaacttgaacaagtcatgcttcactacacttagccttttagaagcatatttcttcatctttgaaatgagaagttggattgggtgatgtccaaaaactatagacttaaggatgttaaagcccatgggctagttcgtctttatttctttgctatctagcccagtgccttactcatatgctgtatagggggaaatgagtttttgttaatacagctgattctgtgttaatagtaaaatatgacaaaggttatacgtttatgggcattaatgcttgcctttcagtagtatctagaaataggaagttagggtaaaactgccacatacctacacaaaagatgatttatgtatcacttatcaaattgtattttatattaatgcagcctaaaagtatattagcttttgacagttatttgatttgtatatcaattatcaaatacaatttgttatcarttgtatttgagatacagttgattatttgtatatcaattcagggactattctgaagataaaagcctacctgttatctccttagttttttcatttcccttttaaatgtcaaataaaaagagaagtcatgagcatggtttcccttgacactaaagattgtagaaaatcaatacatcaaggggagtaagattttcagattcagttgctttctggaaaaccttttttttggaggggttcggggctggagacagagtctcactctgtcacccaggctggagtgcaatggcatgatcttggctcactgcaacctccacctcccaggttcaagcgattctcctgcctcagcttcctggactacaggcatgcaccaccatgtccagctaattttttttttttttttttttttaaagtagagacagggttttaccatgttggccaggctggcctcgaactcctgacctcaggtgatccacctgccttggcctcccaaagtgctgcaattacaggtgtaagccactgcacccagccttacaaaacatatttaatgccctctaattatattttgagacttgggtaataagtattgtcaccacagaaagtaacaaacactaaatcatgagccaggcactatgctaagtgcttttcattctcatttagtaactctgtgaagcaggaacagttatctccatttaattgttcaaggcaactgaggtttagagacattatgtcacattaagtaacagggacacatacaaggaggtgaacaagttttatttgaacagtcatgtttattcatttatatatagtctatgactgctttttggctacagtggtagaaaagtagttgtaatagagactatatggccccagagcctaaaaataattactacttggccctttacagaaaattttaggtgacctctagtctaaactgttacgtatactgcctcaatactatgacatttgtgtaagtcccaaaataccctttattcaaacatcttcaagagtctgtgtttaatagacaaattcctcaactgataattcaaagttcttcacaatataggcacaaacttactaccaaagcactaacaagttttgtctgtgttccaactcttactttctgcccttacattccaaacctactacaccttcctccctctacaacctcrttaatactgttctcattcttatccctgcctatgaaactctaacctagtcttcatttcatatgctgtctcatttcttcatcccttttcttattcccctccttcacttgcacctcccatctactactggatgaactcctctttcttccttttaactttcacaataatttgttcctttcttgcagctcttatagtatggttttctcttttaccttttttgtactgcactcagtcagaagcatgttgaacacaccctattgtatgtcagcgctgtatggctaggctctggggataaataaggcatagttcttacactcaaactgtaatattttatcctgcctattgrattataagaatttaccagggaagacaagtcctatttatcttttaatgtgctcagtaaatattggtgaatttagcagcaaatttagtaacgttgtaaatgattctccagattatgctttaaacttttctttaaatcaccttaatttggtgacttgttctttttttagaagaactgttgatctgttaattccctgtaattagaaacctgaagaaagaaagctatagtaggatgattaacaatttcttatattttagtgtgtttgtaaaataaaactaatgaatgttttcctgtcaagttaatttggagtttatcctgagtttattaaggattagcatcctgaagtgtattgaaacaaaatgattatttcataatgtttgaattgcttccaaactgcatgttatttattctaaactctccctctgataggataccgagacctagagaagttaagaaaacaagccccagatcaatcacattgctcctgacagcacctaaccttctagattccaagtccaatggttttcctggtactatgatgctagtagatcttaaaaaataataatctagatctacactatccaatatggtagccactggccacatgtgattttagctcttgatatgtgtttaattcgaatttagatgtgccgtaagtgtaaaatgcacactgaatttcaaagacttagtatgaaaaaaaaaagtatctcaatttttattacatgaagtgataacctagaaacactggacgaagtaaaatattataaaaattaattttacatatttccttttatttaatgtggctactagaaacttatgtatggctcacatatttctactgaacagcactgatatatttggcaatatacagggtatacattatatatatatatatattctatgtaaatagttcattaaataattcctatagtaaatatgagaaacaggaaactcatatycaacttggaaaagttcaaatataatacttattaagaaatacagttctattcttcaggtactcttacctagaatgaattaaggatatgtagaaactcttatgttacttataaaataataaagagatactgtaggtctctacagagatactatagtgtccctatagtacctctagagtatagtatagagatactatagtatctctttactatatagatatatggaatagactatagagtatctctagactatatattatttatactctactatctatatagtatctctatatagagagataatatatatactccatatagtatactctagagatgctataagtttctgtagtatctttatagtagagataatagggagggataatagtatagggacgtactatatacctatagtatctctataagtacacaagttcccccattaatcatctgttttcagttgttaaccaaataaggtattatgcaggctcatctttttatataagaatactctactcttgtttttgagatgaaaagaagttctctttctcctgctattgataatttctgcagctgtcccctcagcttatatcttttttgcatagctctctcttctttacctcacttcttatggaaggctggtgttctgaaattggggagtggaaaagaagaaaagactgaatgctccctatgacttcattttctccctgttcccactaccatgtccccaaacatactgacacacaaagaaaatataaatacccctgattcttttagccttaaacttagggcctcatcctaaacatcttaagctcagcatctattccaaaggaactctttaatgataacgtttctttgtaaagagacgaatatcatctggggtttcctctgaaatgtagatgaacctcacttcagttctttgtgtactaaaaagacccacccttctcacccatgtggcttttgtctttccttgtgttatgtaataagtgatggggtagaaggatggggggtggaggaagctacatcatggagagaggaggtagaagacagctgtggaaaatttggatggtggaagactagaatctactaccatttacatgctaatgaaaaccagaaatggtcttttttcccccgtttgatctgatttgaaagtttgtgacttttgtctagtatgtcattttaccccctgtgtttttctcattgttgttagctataaaaactctttgaaattctcaaaataaaggaaggtttctttcaggaataggagggctgaggacaagctgtgaaactgcattcttcatagtgggtctattggggtggaaaacccgcctctgaagtaatagaaggtagaagcacggaaggaaacaggtctggccctggatccaggaaaataaagaaagaaataattggagatgtagcttagtacttagaattatcccrgaagtgaacaacatcagtaaggtctgggcttccacctaacgtaacctcttatgagggtctcaacctcacatccatatatcttttaaaaaaacaaaacaaaaaaaaaaactttcaaaacaaaggcaagaatcatgactttcatataggtataaattgcaagtaaaaatttattttactcatataagggaacaaggcaggtgttacaaccagttcagagtaaaagtcaaaacagcactaattcatgtgaaataaaaaaacgtagtgaattgcaaatagaggcaaaattgggttttggtgggggaggtctattaagtagaacacaggacagaaattacatgtgtatcaattgtgtacaacctaaaaagagttgccaagtagctaaaagataaggaactgatctaaaatctgataatctagaaggggaagggtgtgccagagacaatgcacagttttccattgaaacaaaggtttttttttctattccttctccattttgattaggaaataatctcagcaagagattatttgtgatcacaaaataacattggtatgatatttagccttatttacataggtgtagcaagagtgttaatttgtcatatatgctttcttgtatgctttggtgaaagtttttacaaggaatctctgattggactttgaagtctcttgagctaggaaaccacaccaagaacttgccactagatttaaaatctagtaaaaagattcagtaagtctggagtatggcctaaatatcggtatattaataaaactcagataagtgacattgatttccagttgacatttactggcctagaagatgcaagatttaaactacagaagtaaagatgcaaccaagttaatatttttaaaaataacaaattatgactgataaactatactgtaattatttgctgggcaaagcagtacaaggactcaggtaaatagaacacatcttgagcagtgaaggcattgataattccccaggaacttaccatatagcatacaattttggttaataacactttacccatgaaatttaaccttgggatggctaaacatcttttctgcattgacaacttttctcatagttgacaactgttctcaagtagcttgttaataatagcatataaaataaacctaattattttttagcacctctcttttcacaaaatgaaagaatgtatctttgtgattttccagaggccctctagggaatctcagagataattctaggtgcaatgatatcctgaaagttttattttacatttaggattcagttttgggaaggtaaatatcaaaagttgtccggagatgtgaacagttagatatagaatcataggtacctgagaaatgatatgtggccactcattgcaaagtcacagtaaaacttaaatatagaaggtaatatgatggtaaagaaagaaccttagctcttacaatgataagacattctctttctctttctggcacaatcagtcactttacttgaggacataactattctttttcctttaataaacaaaaacacatctcataaccttgcattgcaaagttttacctctctgccaccatttctcctattccagtttcatttatgtgtatcttttaaccaaagtgactgattccatagagaaactgggagatggagaattgaaaatggttacacgtcagcattttagtagactagcagatctcataaatacacataactttctatagctatatgcattccttatactccaacttctccaggtggcaaaaatgaacatgttcattaaccaactcagagatacagcctctctgtagcatatgaaaataagtagcaagagtttataaatttaaaattttgcctagtaattatagtggagaaaagatgtcttttctcacccatcacataggttcgtctcctataataaaagacagttaaaaatagaaaagcacatatttatttaatgtaagttttatgtgatacaggacgctttagaaatgaaaacccaaagaaacaggaatacttgtgtattttatgctaaatttgaagaaaaagtatattgtgtgtggaaatatgactggataaagaaggtatgatccaatagtaataagctagagagaacttagctaggcctgtttgttcagattcttctcttaagtccatccctctgtgatattccttgcctctgggtgatagggcacatgagtgtcttatgacttcttccacgggaaggccagagaattattttatggtctacttcaaggtacaagggtgggaggaggtcagagtggccttccttctctgtttcttcaaatgccaaggtgccattattttagggtagcatgtcctgaaccctatcattatcaatggattagtattctrtcttacttagaagagatctagggttcacaactaattgatcacaaccggttacagatatcattattccttttccactcccacagcttgactccactagccttaaaaaataattaaaaaaataagagatctggatatctaataaatatctattaattacctgacaatcttggaaattaattttgaaggtgacatattacaaaacataattattgttgaaataaaattgtcaataatgaatcaatttggttaattgtaagtttacattttttcttgactaaacattaaacaagtaattttggcttatttgatcagtaaacatgtataattaaaaaaatacgcaagtggaataaaagtctgtttatatatttgacattgataaaccaragaaaaccttgctgttttattaaaccaaaattattagtcttgtttgtcaagatttacctacacgatatgaacttgaagtctcaaaatgtttgttagttgctcttagagtactttttaagtactcttaaaaagtacttgtagcttaaaataatttctagcacactgaaaagattagaagttccattttcttctctgaaaattttaagattactcaatttacataatcacttacttttctctataagctaatcagaacagagttcctttttttttttttttttttttttgaggcggagtctcactctgtcacccaggctgaagtgcagtggctgcaatctcagctcactgcaagctctgcctcccgggttcatgccattctccagcctcagcctcccgaggagctgggactacaggcgcccgccaccacgcccagctaattttttgtatttttagtagagacggggtttcaccttgttagccaggatgktctcgatttcctgacctcgtgatccgcccgccttggcctcccaaagtgctgggattrcaggcgtgagccaccacgccaggcccagagttccctaaaaagactttataatctaatcagtgccacctgaaggtagaaaagccttatctacacgcacaataaggcttttctctatacagacattgatagacatacagtcacacagartttataacttcagttctaaactttcagccatgaattaataatacaaaatgatgaaataccaaagagctgttcttttctgaggacaaattattaattgatttgagtccaaaatagattaacaaactagattctccattttttctcacccaatagagaatagacctctataaaccattaatccatttacagggatcatcagatggtcagattgcaaaaccaattccccagattagtagagagcaaaagaccagagtcagagtcagcagagttctcttactgctttggattcaccttttagagccaagaaaagaggtatgcaggcttaagcataaggtacaccatttcttcgatgatgaagtttgcctgcctttggttgataaatctataggatgtctcaaggggacctccaaaatggttaaaagaaattttccagaaaaagatacattgactctagcatagatatacaataaacatgtattgaaggattttactcatctgatataagggagccaggcaaatgttataaccagttcaaaggacaagtcaaacagcacagatttatgtagggtaaagaaatgttgagatgagttgctaattgagacaaaactgatttttccaggactgrgttgagaggggagtcaaatctatgagagaggacagactttatgtatctctcaattatagttgttctccttattcacagttatgttctttaaagtcactatgaaacactaaattagcaagaattcttatccctcgggatatacatggttaggttcctgcaggcctctggtcacatagtttgtcrtctgaccagtacataaccttgttttatatgtgtttttgtttaaagacaccttatttaatacagttaattcatcaacattgaactcacagccaacagcactataactcatgcctaaacaaagcgtatctgaaacacatattggcacatcacagctttcttggaacactagataacatttcagcagtgtttggggaccattttaaacagtgaaattaccaaaaagcagcacagaaatgcaaaatactggcactaaatagagcacaaaaagtatgcttgtttacagtatgagagctaaaacaagaaggcagagcattatcctgcttcacctcatttagaaatgtatgttacgggactcaaattttttgacattctccacatgtcacaaatgaccacagaagcaccatgggcattgatttaggagtcacaaataaactttaygtgaattcaygaaagattttttttttcatagatagctttttcctcccaatgtttaatcctggatcctgtctgtagctagggaagtactgctaaggcgcgagcacgagagagaattatatatggtggcttactgacgttcctggtatattataggttaaataggattctgagactccctatgagtagcttgcaaatctctggaagtggtttttggctatttgtgtagtttttttctccagaaaaatgtgttctaaatttctaatgrctgattttcagatatacttttggaacacaaaagctggagtaatggattactaccttggtttgttttgtggcaaatgctgaatagttccaactactgctttgaaaataatagaaatattacatagcaagtatattatttgaaaagataaaatttcaaggggccgttgactgtcacatcaaagcagtaatttggggtttgagaggtggcaatactctacagcaggtgtagagtattactaatctaacaaatatttcaggtgcctcrtgttttcaccttatttgcttgtttaaatcactttatataaatttcatggaaagacttgctttgccagtgtatccgaaacctctgttatttctccatagtattttctatagaagatctaggatacttttacattattctgaaccatttacyccctactgtaccccacccccatattatgtacctaattggtaatttcaaagtaaagagacttttaaagtgaaattcctaaaaagctatttttcttttctccttcttaaaattatatgttagggttatgctccgctttcagccagatataatatgggtacatagcctggtgaagaatcttgaaaccttccaagtaccagtataccttgctttggcctcccaaagctttgctcttctgatcccatgcttcagttggaagtgactgtcagttacgtcagtttgtgccaaattatgtggtagttcttgttctgtgtacaaatggagagtaggaaaaatcatttagctgttcacttccaaactcatgtcagggtttgagattaggttattagagaagacagacctttcacagaacgtcaatcaaggttacttgagataaaatatttcacaagcaataaaagaactgatggatgtttgtatttttgtattactgaaccataaatgaaatgattctgtataaaaatgaatgaagttgattttatttttctgtcttatatatggaattcataagttaattgtggcctggttttgttcagaggttggggttttttggcatttgaaaagtatatcatttatatcataggaaatagaatattccactcacaatgtggagatctacaaaataaactgtcatatttcagaaaaagaaattgggcatgggatgttaaagatcacattttaagtttactacagcattttccaaaggtacttctctgatactagggcttaaagttcagactattttgtgaaagcgtttcagtgtgtgaaacagcaaagggagtcagcttctcatcatttaggtgctggtagttgggtttgtggcaaatctgtgccatatggctactctcctctagaaagtgacggcagcactgggagctttacctatccctagggcagctgtcttggactccattgctttgatcttcttctgtcgcacagctgagaagagcaaggggctggttttcagtaccctaataggacaacatatgggaccattatgattgtagactataccttcattttatataagcattcttcagagagtgcaagtattttcacttccatattcccattcagaaaaataagtttgggctctttcttttaaaaaaaattattttagggttaaagaaagacattcttatagaaatttaaacatttaatatctacattttatttcttgcaaaatacatcctttttagcaacaagtttcaaataggaagtagaaaagatgagtataattcgtctaacktacccattcttaagcatacatgcttaatgtcctttcaagtgttgttattcttagagttttatctttttagctcagcttccctgtttgctcaagtaacctttacattcgagtatagtgggaccagtaaatttgttcatccaggtactgtaacaaacaccttggaggaggatgcttggaaatgtgatcagattcttaacagtacctcaaaaaacagcaaatttttattatgatgacagccctacatagcagaaaagttttctgaataatgaatagaaaatccaaagagagatgtatgtggattcttactttagttttagtctctattgtgaattgtcattggacttcctcatatgctcctttgcgtttagagaagcacagttgcatgtgcaactttggaaacaaagttgtttgccacagaaaaacgggaagataataaattttttttccctacacatcctaacaatcatgagtggtcagtggtaattatatagagatggatcctattagaaaatgcatgcttcttctctgtgtatttttgtttgtttttcacagggtgctttgcccatccacattccaatctctgtcatgatacttctatttatgttgttatcaccatcaacagcaactgtaatctggctcacaattcccaggagccagctcactccttagttaccaggggaaaacccaaaccagttgttcttttcttttatatgtataaaacttcattcttctcacattgcagtgaccctgaccacattttggaactccataaccagaatagatattagaactgtgtctgagatctgatgtagtacagagaattctacctggcggctgaaagggtaattgagtgaatgagagagtgattatcaggtttgtgtttgtgtgtatattactatttcctagatatttgagtgctttctcatttcttctgcagtttctttcctaatgtctttattgacctggagagtgtgtgttgggaggtaataagaggagagagaacttaggtttcttacctatcatttggcaagaaaagaatatggaggtcttgggttaattttccagctatcattataaccacatacagartctacactagaaaccatttccttcctcacaattgtgggagagcacatggggaacatatatttattttacaggattcttaaaagtcttttcaacatattttttcaaataaaaggaaatgaatgaaatagataaaacttgcaattgcgggatatttttaaagaaatgcagttttattaataaagtacttaggtgttaacgtccatcttggttaaaatcctggttttgcaacttattagccctgtgaccttaggctgtttatttattttctcgatattttttcctttaaggtaatgtaaaattaagatatatattataatgccttccttatagccatgcaacctataaactctgtacataaaatttcaataaaaatacatttcagtgtggcgattcctcagggatctagaactagaaataccatttgacccagccatcccattactgggtatatacccaaaggactataaatcatgctgctataaagacacatgcacacgtatgtttactgcggcactattcacaatagcaaagacttggaaccaatccagatgtccaacaatgatagactggattaagaaaaagtggcacatatacaccatggaatactatgtagccataaaaaatgatgatgagttcatgtgctttgtagggacatggatgaaattggaaatcatcattctcagtaaactatcgcaaggacaaaaaaccaaacaccacatgttctcactcataggtgggaattgaacaatgagaacacatggacacaggaaggggaacatcacattctggggactgttgtggggtggggggagyggggagggatagctttaggagatatacctaatactaaatgatgagttaatgggcgcagcacaccagcatggcacatgtatacatatgtaactaacctgcacattgtgcacatgtaccctaaaacttagtataataataataaaaaaatacatttcaagcactcagcatggggactagaacatactacctagtacaccaggaatgctcttgtckcagggcctttgcagttactgttctctgcctacttctcagggagggaggtctcccctgtataccccatctaaartgttttctcctaggttagattatagctagctatacccgaaacaacacaaattcaaatttaatgggctctaatgtaatggaaatttatatagagacatgttgctatgaagttgtgaatcaaatttgaggascaaataatacttaacatttattgagtgcctactataaaccacaagagacaatgtagcataataggtaagttgtagcctccagaatctggccgtctgtgtttaaatcctgattctgccccttctttgctgagtgaccttatgctagttacctaacctctctgagcctcagtttactcacctgtacaaggggaataatattacttcatataaaggttttaggaaaagttctttctcatagaactcaataaatgattgttaagtcaggktgctttctaagcactttacatgaattatcacatccttatgaagtacaagacatgtactttaatcctcatgacaaccttatgaaagacaaagttttcttatgccctttagtaaattttttgaaatggagataactacttgttaatgtacgtactttgtaagtccacattctcttaaagtaagctatagctttgtaactttaatggataagaaagttctcaaaacatattttctactctgtgaaagtaaggtwatgttgaacaagtaaattaatattttctctcctggattctgatgtttcatttgctttcctgcttccccatttccttatagttattggactttctttggagatggagttccagcagttgggaatgtaatattctcttatggataaagtagattaaaagtttaaattaaaataygctgttaaatgttgttactttcctttgtgtacagtagtagtagtatactttgatgagttgagttccataggcttaacttttgtggtaaaactgaatactaactaagggactattgaaatgtaagctttgtggcagaaagtactatacttaccgagatcaagaggctcaattagactatataataaataatcacatttgggacattttgtacatgactgcatgatacagccatgaattagatgtttcaagatgttatttgaataaagtcctgagagaagaataaattacaggtgtgggaaaatggattttatgaagaaaagtgaatgttataggggttgcctagcttagggaataaaagaatgacttaattatatttttaaggaggaggatgttgatttgtttcccatgttttaggagaactaaagaacaggactagtgcagaaaatgtagacatacatatacccagttttcagaattacaaaatgctgaaatggctttggaaggaaaatataaatactcagaagagaatagacagacacctttgattagcggcccttacttttttatgcataaaaatctcctggaattgataaagtgtagtttcctgggcccccaccagagattctgatctagtgggcctttggtcaggcctaacaatttgcgctctttatcaggtactcccatctgagtccaattagtgcagatagatagatagccattgaaataaatgttgaaaatcaatttttgagtttaatcagtagcctgtccaagtccaggggattgaaccaagtaacctctcatggtccacttcaactatagtacacacatgcacccatacacacgtacatatatatacgtttacatatttttctrtatccctttggaagagttccaaactcttgtaaagaaaccaacttttagaataatagtgagttggttataatgttcatcgctcttcattgcaactattttaaaggcctatgttaaaccacatagagtaatggaaatttttatgtaatacatagatatcagtaattgagcaaggtgaaattgaatcatagtttacatctttaacaayttgagatatggtaaataatctgcaggcaatcttttggacccttttctcacaraggattataagggaacaaatagtaagtatatctcagatgtgttgacatatactcttgatgataaatgaacattaagttaagttataaaagctagcctctgcttgctgtgcttttcaggtatcctctttaattctgtttctgtggatttgtctttgttttttcctcctaggatggagctatgacattgaagagaggaaggttccaaaacccaagtccaagtcttatggtgcaaacttttcttggaacaaaagaacaagagtatccmcaaaataggttggcactgactatatctctgcttgactgtgaataaagtcagctrtgcagtatttatagtccatgtataataaatacatctcttaatctcctaataaattggacctttaaactacagatacattttgtggtgtctattttaaatgttttttgatgtctcaaattgagcatgtttcaatttcctatatagagagaagatttgaggtgatcatacctctgggaaatcttggtacttttagaatctattaattaacaggaatgcttgaaatcaactgcaacattgaagttttatatttgctttttatagccattctcaagttaatatggtttataaatcaccagccaacattattaaaatgttgtcttagaaatggttttatcaatcataggtagagaagtacacgataacattgcagtcttataaacttaaacccctatgtcgtcattattaaattaatttaattacaactttataatttacgaaggtactttgagcctgaatgaattgcatttcatagtaatctctgcccagaaatcaacacttcatgattatgaggagttcaggtgaagatttcatgttcttaggaattaagactcagagaaaataaaaatcagttcattcacggggatttgtaatattcactgtttttttttttttttttaaatataagtagatagatatatgcttttattgttaatcaatcaatcatttaggtcatacattatgagttaaacaaacacatgctttgtttttggctattcaaagaaaagaacactttgtatactaaccctcataataaccctattagcaggaactattattttacccattttgcaaagaaaagacaaaaaatcaaggctgaaaatgattaaatagcctgctcaagatcacacaggtcatgtgctgtggctcatgcctgtaatcccagctatgcagaaaactgaggtgggaaaatcacttgaagccaggagttcgagaccagcatgagcaacatagcaagacgccatctctaaaaataattaatatagaaataaatataattatttttaaaataaataaattagcctggcatagtggcattcgtgtgtagtcagctacttggaaggctgaggcaggaggatgtcttcacctcaggaggtcaaggctgtagtgagctatcatcatgccactgcactccagcctgagcaacagagtaagaccctgtatctttaaaaaaaaattacgcaagttctaagtgccaaatctgggacttgaacttatttatgtctgtcttcaaaattcgtgctctatttttagttctgaaaataattaaaaatagctaatggagttgttaatgtcagatgatttcttaggatttttaatgttatttgatgtttcaaagttataaactaaatatacattttcttacaactgcatttctgaaaacaatagctctcattgacagttttggagagcatattggcagccttttttcaaaatgttaacttcatattccatttaatttgaaaaatgcacttacaggcaaatagcctgtagatatacagaggtaaatgtccaaagatgtttattgtaaagttgttgctagtagctaaaatgtcgaaacaatctaaacatctattaaagggggaatagagttcaagagtatgatacagctatttaaaacaacaaaaaaagtatattattattagctttttggaatgaagttcaaggtatattgctaagtgaaaaacaccaagaatagtagacaaaacatatgtgggagtgaagtgaggcagcagatgcttacatatatgtacctggaatattttagagaagatatataagaactttttttttatggtttatattctttttatatatatatatactttaagttttagggtacatggtgcacaacgtgcaggtttgttacatatgtatacatgtgccatgttggtgtgctgcacccattaactaactcgtcatttaacattaggtatatctcctaatgccatccctcgcccctccccccaccccatgacaggccctggtgtgtgatgttccccttcttgtgtccatgtgttctcattgttcagttcccacctatgagtgagaacatgtggtgtttggttttttgtccttgcgatagtttgctgagaatgatgatttccaacttcatccatgtccctacaaaggacatgaactcatcatttcttttggctgcatagtattccatggtgtatatgtgccacattttctttttttttcttaattattattatactttgagttttagggtacatgtgcacaatgtgcaggttagttacatatgtatacatgtgccatgctggtgtgctgcacccattaacttgtcatttagcattaggtatatctcctaatgctatccctcccccctccccccaccccacaacagtccccagagtgtgatgttccccttcctgtgtccatgtgttctcattgttcagttcccacctatgagtgagaatatgcggtgtgtggttttttgttcttgcgatagtttaccgagaatgatgatgtccaattttatccatgttcctacaaaggacatgaactcatcattttttatggctgcatagtattccatggtgtatatgtgccactttttcttaatccagtctatcattgttggacatttgagttggttccaagtctttgctattgtgaatagtgccacagtaaacatatgtgtgcatgtgtctttatagcagcatgatttataatcctttgggtatatacccagtaatgggatggctgggtcaaatggtatttctagttctagatccctgaggaatcgccacactgacttccacaatggttgaactagtttgcagtcccaccaacagtgtaaaagtgttcctgtttctccacatcctctccagcacctgttgtttcctgactttttaatgattgccattctaactggtgtgagatggtatctcattgtggttttgatttgcatttctctgatggccagtgatgatgagcattttttcatgtgtcttttggctgcataaacgtcttcttttcagaagtgtctgttcacatccttcacccactttttgaatggggttgttttttccttgtaaatttgcttgagttcattatacattctggatattagccctttgtcagatgagtagattgcaaaaattttctcccattctgtaggttgcctgttcactctgatggtagtttcttttgctgtgcagaagcactttagtttaattagatcgcatttgtcagttttggcttttgttgccattgcttttggtgtttcagacatgaagtccttgcccatgcctatgtcctgaatggtattgcctaggttttcttctagggcttttatggtttcaggtctaacatttaagtctttaatccatcttgaattaatttttgtataaggtgtaaggaagggatccagtatcagctttctgcatatggctagccagttttcccaccaccatttgttaaatagggatcgtttccccatttgtttttgtggggctatcaccaccgatcccacagaaatacagactaccatcagagaatactataaacacctctacgcaaatgaactagaaaatctaggagaaatgggtaaattcctcgacacatacaccctcccaagactaaaccaggaagaagtagaatctctgaatagaccagtaacaggctctgaaattgaggcaataattaatagcttactagccaaaaaaagtccaggaccagatggattcacagccgaattctaccagaggtacaaggaggagctggtaccattccttctgaaactattccaatcaatagaaaaagtgggaatcctccctaactcattttatgaggccagcatcatcctgataccaaagcctggcagagacacaacaaaaaaagacaattttagaccaatatccctgatgaacatcgatgtgaaaatcctcaataaaatactggcaaaccgaatccagcagcacatcaaaaagcttatccaccatcatcaagtgggcttcatccctgggatgcaaggctggttcaacatatgcaaatcaataaacgtaatccagcatgtaaacagagccaatgacaaaaaccatatgattatctcaatagatgcagaaaaggcctttgacaaaattcaacaacacttcatgctaaaaactctcagtaaattaggtattgatgggacatatctcaaaataataagagctatctatgacaaacctacagccaatatcatactgaatgggcaaaaactggaagcattccctttgaaaactggcacaagacagggataccctctctcaccactcctattcaacatagtgttggaagttctggtcagggcaatcaggcaggagaaggaaataaagggtattcaattaggaaaagaggaagtcaaattgtccgtttgcagatgacatgattgtatatctagaaaaccccatcatctcagcccaaaatctccttaagctgataggcaacttcagcaaagtctcaggatacaaaatcaatgtgcaaaaatcacaatcattcttatacaccaataacagacaaacagagccaaatcatgagtgaactcccattcgcaattgcttcaaagagaataaaatacctaggaatccaacttaaaagggacgtgaaggacctctttaaggagaactacaaaccacttctcagtgaaataaaagaggatacaaacaaatggaagaacattccatgctcatgggtaggaagaatcaatatcgtgaaaatggccataccacccaaggtaatttatagattcaatgccatttccatgaagctaccaatgactttcttcacagaattggaaaaaactactttagagttcatatggaaccaaaaaagagcccgcattgccaagtcaatcctaagccaaaagaacaaagctggaggcatcacgctacctgacttcaaactataccacaaggctacagtaaccaaaacagcatggtactggtaccaaaacagagatacggaccaatggaacagaacagagccctcagaaataatgccgcatatctacaaccttctgatctttctttgacaaacctgagaaaaacaagaaattcttaatggtgactttaatggatgccattggttgtgggaaagggggaggtcttttacatttatttcagcttttaatacactggttaaattattaccgtacagatgtaatatatatttttataattatatacatacacacacgaagaaaacccactacatttcttcatatgttgcccatcttaagccttacttgactaatacacattttaataattactattttagaattttatttcagatgaaaggtaaacttttaagaaagaaacctgttaagaagttacccagttttgctggaccctttccttacaccgtatacaaaaattaactcaagatggatcaaagacttaaatgtaaaacccagaactataaaaaccgtaggcaataccattcaggacacaggcaggggcaaagatttcatgacaaaaataccaaaaacaattgcgactaaagcaaaaattgacaaatgggatctgattaaacagcttctgcacagcaaaataaactatcatcggagtaaacagacaacctacagaatgggagaaaaattttgcaatttatccatctgacaaaggactaatatccagagtctacaaggaacttaaatttataaagaaaacccccattaaaaagtggccaaaggacataacagacacttctcagaagacacacatgcagccaacaaacatgaaaaaaagatcaacatcactgatcattagagaaatgcaaatcgaaatcacagtgagatactattttatgccagtcagaatggctactattaaaaagtcaaaaaacaacagatgctggtaagattgtggagaaaaaggagtgctttcacactcttggtaggagtttacattagttcaaccattgtggaagacaaagtagtgattcctcaaagacctagagcagaaataccatttgacccagaaatctcattactgggtatatacccaaaggaatataaatcattttattataaggatacatgcctatgtgtattcattgcagcactattca

SEQ ID NO: 95884 - DNA, 50436 bp, Homo sapiens
ctatcctctgcaatttcccttcatctcttggtccagccccacgtgaactgacctcagttacttctccatccacatcctcccccgccttcaggactcttttctgcctccacatgaactgagcccagctccctctccttccccatcttcctgatccctttacagctctctggtccagccccactgactcatgctccctctccgtccccatcttcctgatccctttacagctctccggtccagccccactgactcatgctccctctctgtccccatccttccactgaataactgcacacctatgttagaatggctgccaggcaaagaccttatgtttgcttttatcctcagggataacctattacttgccactctccgtcctgtctcaagagattcctgagagatttcatttatgggaatattaagcaggaggagataagaatgtctccaggatagtccattagcttaatttagccattcaacaatgtatacatctttcaaaacatcatattgtacaccataaatatatacaatgttgtcaatttcaaaacttctttttaattaacttttttttccttatccctgaaactgtttttttttttttaagttaagttccgggatacatgtgcaggacgtgctggttgcataggtaaacgtgtgccacggtggtttgctgcacctatcaacccatcacctaggtgttaagccccacatgcattagctatttatcctgatgttctccctccccccacacccccacccccactgccaccgacaggcccctatgtatattgtccccttccctgtaactacgtgttctctctgttcagctcccactcacgagtgagaacaagtggtgtttggtttcctgttcctgggttagtttgctgaggataatggcttccagctccatccatgtccctgcaaaggacatgatctcgtttaattaactttttttcaaaagagtgtttccagggttacagttaacagtaaaattggaggcagggcccagtcttttcactcctttccaatattatgtcttttatccaatcatatgcctcttattagaaaatcacaatacaacaaaggtcaaatcctcctaggaaatgctatcaacacactttggggacagtaatgataaaagcttcatggacccacatttaacaacaaagcttatgtgataactgtagcaaaagaatgggagtaagactgaacacttctgaatcctcttgttcttgaataccttcaagccaggtcctctctgtaagtttgtatttcacctccagtgattctgagtaggcacaactcttctccccatcacacagacatcaaactccaggcacctagagaagtagcttgccccaaattgcccgatgaggaagtgggtgtgtgtgagaatccagggtttgggctagtctgggctcttcccccaagtttttcttaaggagcagtccctcggcatgagactcatctgggggatatggtaaacttcatattcctgggcccccaagtcctacaggatgtcagggtccagaggcatgagaccgagggccaggcttctggcctctgtaacgtgctccccgggtagggttaccagtggcaatacaggatgcttaggtaaatttgcatttaagatcaacaatgaataaacaaaaaatacaaatgggatatagtcatactaaaaaaaaggcatcattgatctgaaatgcaaatttacctcaactttctttttattagctgaatcaggcaaccctatccccagaggactagcctacccccagaagtttgaaaatctgttttctccctctccatgtgaacaaacgagcattccatcattgttcattttctattctccctcaccccttctgcctccccactctcaccctggagcagagactttaatgtcatctaccaggatttctcacacagggaatcccgggcaaggccaggaagatggttggatggggtcactcagcccaacccacctccaagagtcgatgagataccataagcaaataaattcacgagaggttggctgaatccatcctagtgttgcgttagcctggctctccccattttattcaagcacaaattactaacaagactcttttccagtcttagctttgccaaaactatttttagagcatcatttaggcttaggtgatataaaaattctgctagttttacaaaccagcagccttccaaggcaaaaagcaattcatgccaggaaagtagcaaaggattattcattttctgtccataggctggtaaggagttttgtatctaataggctgccttcaacacaataattgagaagaggaactcataagcaaagctaaagaactcatccttagagaatacaagttcaaactgagaaaggttttacttttaagacaaaamaaatagcattaacacacatccaaatgccagtgcaggagttcactgggtttataaaagagaaaactaaactcaagtgtcaaataaaaactggagccgtcaagaatgactgcttgtggcaacacaggtgtaacatgtgcttgtctaaagtcgttctgtgtttgtggatatgtggaaatgcatgacgagggaaacgatgcaaggcaaaatggcaggtgctcaaagctttaagatccttttcttcacgcttgtgtgctcttgttttgcttttgagaattagggtaattcgcaggtcattttacaaagaactgtaatatcaaagaacacttccaaacggctaaaataggctcaaggtcactattaaagtgataaagggaggtccgtgggggaaaagtttgtgttctcaaaagccagatttcacaccatggcaggcactaaatctagttacatgtgcttgcagtagaaaaagaagacactgatcttaatagaggctggtctttttcatgatgcgcaggaactcttgctcactgacctctccatctccatctcgatcagcttcatcaatcatttcctatatgacagtaaagattcaggttaatttataaactaatgccaaaaggtgactaagtaatagacttttttttttttagagatggggtctctatgctgcccacactggtctcaaattcctggccacaagagatcctcctgcctcagcctcccaaagtactgggattatatgcatgatccactgtgcctggcaagcaatagacttttaatctatgtgaatagataatttgtatctatgtgaatagatcattgtagtccacccaatgccagtatgctactcctgataatagcttggtttctgaaaagttatttgaaaaccaactcatactttgtcaaacatatcacctgggagggaccttgaagattgccttgactagagggattcctggaacctaaaatagtaagcaaaattgtgcatatgtgcatttttctggaagcagggttcataggtttgtctgactattaaaggagaattaagttgtctgcagagggacaaagtacactggcttttcttcaaagaggtgctcacactagggaaaatgtaatggaaaagtcacagagggctcaaaggtgggaattttaagttccagtgtgatgcattacaaacctgcagctcctcatcagtcaggttctcacccaactccttggccacgcgtttcagatttttgaacgaaatcttcccagtttcatcatcatcaaagagcttgaaagctttcaggatttcttctttagtatctttctcagacttaacaagtagaacataaaacacatgagtagggggacaccacggttggttactactgtcctgtagccctgccactgcctggtcaggtcaccctttcctttttaacaatgtaactcgagtctagacttgcggcaagtgtcaggaagcccattttggcctcaaagaaacaccaggcaagccaggcactccatccaaggtgacgtttgctacctatcgctatatctctccctatcccatatctatttcctaactgatttggaattctgtgggaagaggtatctgcttggaagtcttgagaaagaagcacaagggcttgttttgggagcccaaagtaacatgatgggagggcaggcctcctgatgcagttgctacctggactgctctgtggtcacatgactgttttaacaggaagacgccatggacctctgcagatgactggggctccataccatgataattgtcttagctacttaccattttctgggtcatcacagttaaaaagtcaccaaagttcatttttcctgtcccttccttatcaatttcacttatcattttcttaatttcttctttcttgggttcaaagcccagggccctcattgccacctataaagaaaacaggatcgtctcaataagcacatctaaagtagcaggagcaaaaataacagtgttgagagcattaagccagcatctgatgtggtcatgttaatatgattggggaacactatgacattgatctaattgatatttgcaatcaattttattgaataatactcaaagtaagtaaagacaggaaaacagcacagtacaacctcccctgttacttactgcagggagaagagggcaaaaggggtagagaggtgatagggagatgacaaggaagaggcagaggaaaggaagggcagtacggcaggaatgcacagagcttgccttcagttctttaacatctatggtgccagttccatccgcatcgaaaagatcaaaagcttcccggatctcctgcttttgctcttcagtaagctcaggcttagggctcattctttttcgctgagaacttgatgccatgtttgccttcttaaagttggaggcctttatatgttatgcaatacacaagcacaataatatatcatacagtccatatttacataacatagttacagacacccatatgtatttttaaagtcatttatataaccaattccaaagctttgcttaaaaagaaagataacagggtttactggcaagaacaatgaatctttccatgaacttctacccctcccttttctttactgttgtttctagaagcagggagatcacttgttcagtaaggacacctcttactgaaaatcatcccaaaagagagccagtcaagaagatgactgtgaataactagagataatcagctcttcccgaacgtggggatcctggttctgaaaacagtcttacgatgcccactcccagtactccccttcccagtaagtactccgacttcccaattacttctagatttggccaaatattagtaagttgttaagatgtatattgtgtcagtaccgagtaataaaactcaatccatctggcaccttcgtgccttctccaagaagctaaagcatcccctgaatgcccctgtatttaaattgtaaaaaacattgtaacagaacacgatacaccttttcccagctgtgtgtggaaattttggcagaatgaggaggccagggggccaaggtctgagagagtcaggggcctgtgagggattcgagtcttttttgcccagggaggttcaccgaggggatcagggaatgcaaggggagcccgaggggcgggtgtgggcctgttgtgggtgaagaggaggcagcagcgaagcgcaggcccagtaggttggttagcgtctgtaccctactctcccgggaaagagctcaaaggaaagactggtgcgctaaagccgagaaaggcgcaggagaggcggcgtggccgagctggggcctgggaagggctcagccgctgggcgtggggcgcgacagagcggcagcactcaccatagccaaaggagtccgctgccggttgttaggcaaccgacgtgtacmctgactcggcgccgttcccaccgccccgcgcgcgcagccccgctccccattggccgtccgctcgtcgccgcctctccctattggtgcagggccgaagagggtgggactaacctggcaaagccccggcccagcgcggggaggggcacgctggcgacagagccccgtctttattgggcaagatcacgccgtgagcgccaattrgctgagtcgtcgccgagctgggccaatcctcttggtggaggaagctcggctgattctcggctcacgcgggaggggagtaaagggtggcggtccgggcctggagttcagtgggtgcagcctgcttgcgagctgaggccagacaggggggcgcctacggacgggtaagagtcgtggccttgccattggaggtcaccctgtgtcagcgactgggcagtgcgggagggtggggagctacggggtcgcccgggtcgggtgctttctgggttgacctaaggctgagtttagggaccgagtgcatcagagcagccagaaacgattaccttgcgtgttggagcagggactgtactcacggggcaactgagacccggagaggggaaggggtgtgctgagtgttgtcgcagaggtcggacggctgggacctaggaactgaatccagccgaggctcgctctttgagggtggcccttcgagagcacccctagactgacccagatgtataggccccagaccaggttccaagagaggatcactttagatcttacctggctaaaagcagcccaggacggtgaactggggcctttgggaacggactttgaaaggagtgagggggatgtgagcgagcatgaggggcggggagaggtcatcaaaatatactctttttgacacccacacaatgcagataaggaggagcattccaggccgagacgccctcatcagcagagtcacaggagttttggaagtgagaggtatgcttggagaattaaaagggagcgtgtgcaagggctgtggactgacatagacctgcagaagtggagctggaggtccagtttgccctctttagctatccccgtggcttttagccttcacctgtttttcctccaggcataggggcagtaatctagggagacagagggcagagagtaagtttctcagacagagaaaggcccgaggcttattagaaccttttaaatggagctgctgccctttgccctcttctctcttcagcagtgaacagattcctgacttttgggtcatcatcatccccccaagtagtacgagccagagttctcactgtgatctccaaagcttggcacgacgtgtcccctyccatcgctccacaactcttctctcgtctggctcactccagccccagaacactggctttgtggttgaacctcatgtgccagccacactcctgcctctcatctttgtctcagttgtcctctccgcctgcctcctcttaggcaccctatttaagtattgcagcccccagtacaaacaagccactcaccttgctctacttttttttccaacagttcttatccccttctgacctactgtatattttgcttgtttgttttgctctttgttgtccctccactagaaggcaggctgtctgagggcaggcatctttgttgtattcactactggtactccaggacctagaacagagaggggcacatattagacaactgatgagtagctcccctgtttcccagctctcacctagctagtcctccctgctctaccaggttaatcttcgtagtgaacggccctggtcagggcatctccctgctcttaaaccttcagagcctgaaccgtaaagggctccttagcctggcctgtgatccctctgcccagttttgcccctggtaacccttctagcttaatgtccctccataccttgcttcccastccgtcaacctgcagatcggaagcctgacagagtacaagggaaaaacacaagttctgcgcaggctgtgtgcaggctgtgtgaccttgggcaagtcgcttaacctctctgagcctgtttctcatttgttgagtgagaccagtactgtctacctgatgggatacttttgcatctcaatgggatgaactacttatatgtaaagtggcctgatgttgagcaggtcttcaggcagtattacagttgacccctgaacaacatgggtttgaaccttgtgagtccatttacaggcagatttttttctcatctctcccaccgctgagcagcaggatcagctcctcctcatcttccttctcagcatactcatcaggaagaccgtgaggatggagaccatgatgatccactttcactcagtgaatagtaaatatattttctcttccttatgatttcatagtaacattttcttttctctagcttaatttattgctgggacacagtatgtaatacatgtaatgtacaaaatatttgttcatcaactgtttacattattggtaaggcttccagccaacagtaagctatattagtgaagttttaggtgagtcaaaagttatatgtggatttttgacttcggggctccgtgcccctaacccccacattgttcaagagtcaaatgtagttcttgtctctgatttgctcttgtcattccccccgcccaccatgcctggagccttagacttgtccaaaatctcttccctgcactgcagccaaggtgatctttccagtcgcaacactcactcctgcttccaacttctaggggctccaccatctttccccccttgtaactccctagcttggcacacagcccccacatgttctcaactttgctcccgatcttgcttcacacttgctgtgacacagcttgtcactgttataagaacatgctggctctgtgccatcactttgtccttcccaccctggccatggaatgtctttcaggacaccatgcgctctgttttactcactcttctggggccttttgaagtcagcttagggatctcctagttggggcaggcttccctgagccagcagcctgcattggtgctctgggcttgccctcatcagagtggaaacgcacttctgtgactctttgcttgctcctgtctcccaccctagatggcgggctccttgaaggttggcagtgtgtctttgtcagcttctgcctggtagtggctggcatttgataacttgtgaatgaggaaatyaatgcatgaggtgacacctgggggttcttttacaagttacagctcccgctttaaccctgggggtttgtttgagcctcacagtagctctgaggtagggaagaaggacgctgttttacagataaggcctcatggccagcggcagcacgataattcactcaaacccatcttccattccaggctgtctgctgggcctccaggggctcgtggtgtcctacagggtgctgagtgtgaggatgagagcagaaacaggtgctgtggaagcgactcaccttccctggggagggggaggaagtttcacagagggggcagttcagctaggccttgaaggaagaggaggcactcaccgtggagaggagagagaaggtattccatgcagaggaacagcgtaagctaagctcacaggcatgctgctgggtttctgagaggtctaccacaaaataaaagctggcgactttttttgtcctaaaagtaaatagagaaacaaacaactggtggaaacatggacaccgcaggtccgtggaaggacaaggtcaagctgggttgccccagcataatcaaggctaaagtgacacctctaaagagaaatgacctccaagctattggcctcactaatcctaatctgggtattttctttcccatatcacatctttgaattctgaaagggaggctttattgttgttcctacagggctcctgctttgctgtattttctctaagaaatatgtccataatgaaggtgtgtgccgcctcaggtgaatccttctctttgcatctgatcatctggcccagtcctgcagaggaggccaagcatgaggcatgaggtgatgggaaataggggaatcctcttttataatccaaggcttaggcccccatttcaggattycaaagaaagttctaagaaacattacttggcattccttggatagccaaactctactgaggtgtttggggaagggcagtttgcctggcattgtctgcccatggactgaagggatgagctctcagtggccacattctagcttcctgcactggaccttgtgcaagggtggggctccgacaacctttcccctttacaaagatgtcacacttctttctagaaggacgggacgctctcatctctctccctagtttgagacagaatgttctctccttttccctccaggaaatgttccccagcaggaaggaggaggttgggctaactcgcttctctcttctcgcttcacatgaggcggcacacaccttcattatggatgtgtttcttagaaaaaatacagcaaagcaggagtcctctaggagcaaacgtaaggcctccctttcaagatgtgatatgggaaagaaaatactcagattaggattagtgaggccagtggctacaaggtcacatctctctttttttttttttaattattattatactttaagttctagggtacatgtgcacaacatgcaggtttgttacataggtatacatgtgccatcttggtttgctgcacccatcaactcgtcatttacattaggtatatctcctaatgctatccctcccccaggcccccaccccccaggccccagtgtgtgatgttccccgccctgtgtccaagtgttcttattgttcagttcctacctatgagtgagaacatgtggtgtttggttatctgtccttgtgatagtttgctgagaatgatagtttccagcttcatccatgcccctacaaaggacatgaactcatcatttttcatggctgcatagtattccatggtgtatatgtgccacattttcttaatccagtctatcagtgttggacatttgggttggttccaagcctttgctattgtgaatagtgccacaataaacatatgtgtgcatgagtctttatagtagcatgatttataatcctttgggtatatatacccagtaatgggattgctgggtcaaatggtatttctagttctagatccttgaggaatggccacactgtcttccacaatggttgaactaatttacactcccaccaacagtgtaaaagtgttcctatttctccacatcctctccagtatctgttgtttcctgactttttaaagatcgccattctaactagtgtgagatggtatctcattgtggttttgatttgcatttctctgatggccagtgatgatcagcattttttcgtgtgtctgttggctgcataaatgtcttcttatgagaagtgtctgttcatatcctttgcccactttttgatggggttgtttgtgtttttcttgtaaatttgtttaagttctttgtagattctggatattagccctttgtcagatgggtagattgcaaacattttctcccatcctgtaggttgcctgttcactatgatggtagtttcttttgatgtgcagaaactctttagtttaattacatcccatttgtttattttggcttttgttgccattgcttctggtgttttagtcatgaagtccttgcccatgcctatgtcctgaatggtattgcctaggttttcttctagggtttttatggttttaggtctaacatttaagtctttaatccatcttgaattaatttttgtataaggtgtaaggaagggatccagtttcagctttctccatatggctagccagttttcccagcaccatttattaaatagggaatcctttccccatttcttgtttttgtcaggtttgttaaagatcagatggttgtagatgtgtggtgttatttctgagcgctctgttttgttccattggtctatatctctgttttggtaccagtaccatgctgttttggttactgtagccttgtagtatagttcgaagtcaagtagtatgatgcctccagcttcgttctttttgcttaggattctcttggctatgtgggctcttttttggttccatatgaactttaaagtagttttttccaattctgtgaagaaagtcattggtagcttgatggtgatggcattgaatctataaattaccttggacagtatggccagtttcacaatattgatttttcctattcatgagcatggaatgttcttccatttgtttgtgtcctcttttatttcgttgagcaatggttcgtagttctccttgaagaggtccttcacgtcccttgtaagttggattcctaggtattttattatctttgaagcaattgtgaatgggagttcactcatgatttggctctctgtttgtctgctattggtgtttaggaatgcttgtgatttttgcacattgatttggtatcctgagactttgctgaagttgcttaaggagattttgggctgaaacgatagggttttctaaatatataatcatgtcatctgcaaacagggacaatttgacttcctcttttcctaattgaataccctttatttctttctcttgcctgattgccctggccagaacttccaacactatgttgaataggagtggtgagagaggggacccctctcttgtgccagttttcaaagggaatgcttccagtttttacccattcagtatgatattggctgtgggtttgtcataagtagctcttattattttgagatatgtcccatcaatacctaatttattgagagattttagcatgaaaggctgttgaattttgtcaaaggccttttctgcatctattgagataatcatgtggtttttgtctttggttctgtttatatgctggattacatttattgatttatgtatgttgaaccagccttgcatccctaggatgaagcccacttgatcgtggtggataagctttttgacatgctactggattcagtttgccagtattttattgaggatttttgcatcgatgttcatcagggatattggtctaaaattctctttttttgttgtgtctctgccaggctttggtatcaggatgatgctggcctcataaaatgagttagggaggattccctctttttctattgagtggaatagtttcagaaggaatagtaccagctcctctttgtacctctggtagaattcggctgtgaatccgtccggtcctggcctttttttggttggtaggctattaattattgcctcaatttcagagcctgttattggtctgttcagggattcaacttcttcctggtttagtcttgggaggatgtgtgtgtccaggaatttatccatttcttctagattttctagtttatttgcatagaagtgtttatagtattctctgatggtagtttgtatttctgtgggatcggtggtgatatctcctatatcattttttattgtgtctatttgattcttctctcttttcttctttattagtcttgctagcggtctatcaattttattgatcttttcaaaaaaccagctcctggattcactgattttttttgaagggttttttgtgtctctatctccttcagttctgctctgatcttagttatttcttaccttctgctagcttgtgaatgtgtttgctcttgtttctctagttcttttaattgtgatgttagggtgtcaattttagatctttcctgctttctcttgtgggcatttagtgctataaatttccctctacgcactgctttaaatgtgttccagagattctggtatgttgtgtctttgttctcattggtttcaaagaacatctttatttctgccttcatttcgatatttacccagtagtcattcaggagcaggtttttcagttttcatgtagttgtgcagtttttagygagtttcttaatcctgagttctaatttgattgccctgtgtctgagagacggtttgttgtgctttctgttcttttacatttgctgaggagtgctttacttccaactatgtggtcaattttggaataagtgtgatgtggtgctgagaagaatgtatattctgttgatttggggtggagagttctgtagatgtctattaggtctgcttggtgcagagctgagttcaattcctggatatccttgttaaccttctgtcttgttgatctgtctaatgttgacagtggggtgtgaaagtctcccattattattgagtgggagtctaagtctctttgtaggtctctaaggacttgctttatgaatctgggtgctcctgtattaggtgcatatatatttaggatagttagctcttcttgttgaatggatccctttaccattatgtaatggccttctttgtctcttttgatctttgttggtttaaagtctgttttatcaaagactaggattgcaacttctgcttttttttgctttccatttgcttggtagatctctcttcatccctttattttgagcctatgtacgtcactgcacgtgagatgggtctcctgaatacagcacactgatgggtcttgactctttatccaatttgtcagtctgtgtcttttaattggggcatttagcccatttacatttaaggttaatattgttatgtgtgaatttgatcctgtcattatgatgttaggtggttattttgcccgttaattgatgcagtttcttcctagcattgacagtctttacaatttgtcatgtttttgcagtggctggtaccagttgttcctttccatgtttagtgcttccttcaggagctcttataaggcaggcctggtggtgacaaaatctcccagcatttgtttgtctgtaaaggattttatttctccttcacttatgaagcttagtttggctggatatgaaattctaggttgaaaattcttttctttaagaatgttgaatattggctcccactctcttctggcttgtagggtttctgccgagggatctgctgttagtctgatgggcttccctttgtcggtaacccgacctttctctctggctgccctttacattttttccttcatttcaactttggtgaatctgacaattatgtgtcttggagttgctcttctcgaggagtatctttgtggcattctctgtatttcctaaatttgaatgttggcctgccttgctaggttggggaagttctcctggataatatcctgcagagtgttttccaacttggttccattctccctgtcactttcaggtactccagtcaaatgtagatttggtcttttcacatagtcccatgttatttggaggctttgttcatttctttttactctttttttctctaaccttgtcttctcactttatttcattaatttgatcttcaatcactgatatcctttcttccaattgattgatttggctattgaagcttgtgcgtatgtcatgaagttctcgtgccatggtttttcagctccgtcagggcatttaaggtcttctctacactgtttattctagttagtcattcatctaaccttttttcaaggtttttagcttccttgcgatgggttagaacatgttcctttagctcagagaagttttttattaccaaccttctgaagcctacttctgtcaacttgtcaaagtcattctccatccagctttgttctgttgctggcgaggagctgtgatcctttggaggagaagaggcacgctggtttttagaattttcaggctttctgctctggtttctccccatctttgtggttttatctacctttggtctttgatgttggtaacctacagatggggttttggtgtgatgtcctttctgttgatgttgatgctattcctttctgtttgttagttttccttctaacagtcaggtcactcagctgcaggtctgttggaatttgctggagctccactccaaaccctgtttccctgggtatcaccaatggaggctgcagaacagcaaatattgctgcctgatccttcctctgggagcttcgtgccagagggtcacccgcctgtataaggtgtctgtcggcccctactgggaggtgtctccagttaggctacatgagggtcagggacccacttgaggagcagtctgtcctttctcagagctcaaacgccatgctgggagaactactgctctcttaagagctgtcagacaaggacgtttaagtctgccaaagtttctgctgccttttgttcagctatgccatgcccacagaggtggagtctatagaggcagtaggccttgctgagctgtggtgggctctgcccagttcgagcttctcagccactttgtttacctattcaagcctcagcaatggcggacgcccctccccctccaggctgcagcctcacaggtggatctcagactgctgcactagcagtgagcaaggctccatggccatgggaccctccgagccaggcacaggagagaatctcctggtctgccagttgctaagaccgtgggaaaagtgtagtatttgagcgggagtgtcccgtttttccaggtacagtctgtcacggcttcccttggctaggaaagggaaatcccccaaccccttgcacttcctgggtaaggcaacgccgtgccctgctttggctcaccctccatgggctgcacccactgtccaaccagtcccaacgaggtgaaccaggtacctccattggaaatgcagaaatcacccatcttctgtgtcgatcacgctgggagctgcagaccggagctgttcctattcggccctcttggaatgaactgagttcacatctctttagaggtttcagtttagccttattttgctgtggcagctcagctcaactttgtccttccatgggcctgtggtgtggggcaaggtggttggatttcaccagtacaacatatctctgttttcctatattatttttagcttaagattttgtcccagtgtacatcgtgggtgcacatattggtttttaatggattcaaataactaacattttaaaggaagagacttgaggcttctgatgtgtgaaccataacaatccaccagcccctaaaacattgctctttggagtcttgttttcagtagttcagagctattcttctgtatgtctgtgtggtaaagtagacataacagaaaatgtaccatcttcaccatatttaggtggacagttgagtggcattacatgcattcccattgttgagtgaccatcaccccatccgccttcagaactcttttcctcctgcagcactgagagtctgttcccatcagcagtcactccccactcacagagcatttgtccttttgtgtctagcttatttcactgaccataatgttctcgaggttcacgcatgttgttgcatgtctcagaacttcattcctttttatggctgaagaatatgcccgtgtgtggctagaccatattttgtttatctgttcatctgtcagtggacacattgctgctcctaccttttggctgtagtgattaatgctgctgtgaacatggatgtacaaatttttcttcaagtccctgcttttagtttttgggggtatatgcccagacatgaaattgctggatcctattgtaattctctgtttaatttttttgaggagctgccatactattttccacaacgtcgcaccattttacatgcccatgaacaatatatgagggttccaggttctccacatcctcactgacacttgctattttctcttttctggcttttgataatagccatcctaataatgggtgtaaggtgacacctcactgtggttttgatttgcattgccctgttgattagtgacgttgagcatcgttttttattttttgttttttgtttttttgagacagagtcttgttctgtcgcccaggctggagtgcaatggcggcaccatcttggctcactgcaacctctgcctcccgggttcaagtgattctcctgcctcagcctcccgagtagttgggattacacgcatgtgccaccacgcccagctaatttttgtatttttagtagagacggggtttcaccatgttggccagtctggtcttgaactcctgacttcaagtgtttcacctgcctcggcctcccaaagtactgagattacatgcgtgatccaccacgcccagcctgttgaacatcttttcatgtgctttttagccatctttaaagtagatcttctttggagaaatgtctattcagtcagagctattctcaatgtacattttaacccaagcgtatatcacatggtgaatttaggtgagtaggcaggggacgggggttgcctatgggatctgactcatttgcgcggctagctctgggtactccaacccatagagacagctaagctgtcaccaaaattcttatctgactcatagtatttacaaactttaaaataattggtatataatttgagacaaaggagattttgttttgacaagaggctggtttgcaaagaattgtgtgattattgtttcagcagtacagctccgttggggtgagacatgtttcttctttgacctcctacatcctcctctagcaaacgaggagaggaataggctctaaggcttcttgcttttgctagtcatacaaggggacttgtggaattggcagctctgctatttggatttcggcactacaaaggatactcgtatagtttgctgggtctgctgtaacagatgaccacaaactgggtgacttagaaaagcagaaatgtgtctctcacagttctggaggccacaagtccaaaatcaaggtgttgacaaggttgtgttccctctgaaggatccaggggagactcgttcttcattgtttccaccttctagtggctccaggtgttcctttgcttgtagccacatcactctaacctctgcctccatcttcacatggcctcctcctcttctccctgcctttcccctctgtatgtctcttataagaccacttgtcattggatttagggcctaccaggcctccaaggacctctattggcccattcttttcctacttttcatgcaaaacttaaggctacgggagcagttaaagttactttttggttcaagaagaactgaatgaagcatttggtgttagtcattatgctattcattgaatgaggccaaagaggaaatgattctttccacccaagtttgcttgcgagtcccagtctttctttacactcctgccccatgctgtcgctgtacacctactttacaaagcatgtccttggttgtttatttgttagccagcatctagttgttgcgacaaccccaggagttagcctttaggcaggacctgggagccgtttccaggacagataggacagcccctgcctgcccaagcttataccgcatggcagcagattagataggggagaactaaagtggtggagagagtccaaaggcagcccaagaggaggcataggcagggagactcctgcacaggaagctgtgttacaatgataataaaattagctgccttgaatggcgtgttgacaggtatttgacacaatcctcataatgaccttatgaggccatttactttacatatgaggaaaggcaagctcagttcttttaaataactcccccgagggctacctgctggtaaggaatagtagctgggatttgaacccaggcagccgactctgggttaatttattgccagctgcactgaggagtggcgtgatttgtgatttctcatgtgtagagggtgagcagaggcttacaagagcagaactccacaggggtgggcttgcttagcccggctggcctagttagcctgtcatgcggtcctgtcactgccccaggcacacgcccctcagatcccctgccagcagaggtcaataaggccttggtggggtcagaggccagatgtgagccatctccttgcccctgtagatgccatgtgccttttcatttgctcacatttccctgaatatctggggaatctggataagaagccagcagtgggcattcgtgattatatcatcactaaataacagtcacttgccccactgaagcccctgcaccttagatgggatatgcatgtatgcgatggagagcagtatgggagctctggtgggtgtgcccacacatggtagtctcatgacccccggccgatatgtgagtgcccactttgtgctgggcactatgcttcatgcccaagttgcaacagtgggcaaggctttggtgcaaggtgccaaaatccttgttctctagctgctttggtctagatacacattgagtcccagtgagttcaatatcagccacatgtctttcgaatgaacagttgacagggcccctaccaatgtgaaggggattctgggataaagggagggacagggcaggcacagagctacagattgacttcaatgcattctaaaaatggccatgacaagtcaagttttgacatacagtttcttaataacttccattatgagttcagaaaaatgttcccccaaatggctcctccagacattgagggtcctgcatccatttcaaggccattttggctttctacatgcccgtaaagtctgtccccactgggacacatgatcatgcccattcgttaaaagtggcaaggagtgtaaaattcgaggtgtggggttggattggagcaatcacagcaggtggaatcccagtgctgcctgccacctcctcactgaagtgttctgtgaatctagcctttcatgagcaaagttagactcttgtcttgtcgtgggttttgccatctccagatgttaggggagccatgactaagtaaattggcaactaccaagaaaacatggatgcaagaccaaatacatcatagtcaagtggcatctttgtgtttgcagttcagtatcatgggtgactgaggagaggagcaccctaagggctgtcactaaagccatactcctctgtttggcaacgttgtcggattttattgctaccgtctccctgctgtgaactgctgggtgcccactgtactctgatcacttctcaagggtttctgatggcccaagatgctaagttcctccacgcatcgtcagggcggctttaacttagccaagcaggagagctccgtctcctattgcactccactcatcccccgtcccmgcatcccatgtcctgagctcctagacatgagcccttgtgcccatttcattgatgggaaaactgagctgcagcaaagggaagtgactggagcaattccgtacagttcgtgataggcccagagcaggactccctaggtgtgggcactgctacaccctaatgagcaccacaggggaaatccacgctgactgaagcgtgggagagccatggaaaaagctacaatgccaaagacgttttttatgttgtcactgataagtgagctgatttaactggcctcctgtgygcctctaatctaacagtgtggtgagtcataggcccagtcgttggccccgttagccgggcatggtggcagacacctgtaatcccagctactcaggagcctagtgtcttgtcgaacagctgtcgctatggttcagctatttgtaaaaacatgaacggggggatggcatctgcccaaaacactaacaactaaagatgttttgacttaggcaacattaatgtctgtctctaactatgtctttaagaaaagaaaagttgattacaaacgggaccatattttgcttcgaaatggaaccagcagttagcgagccartgagagaccaagtcgcacggactcatttgacagaggacactcccaaagtgaatgctgacatagaaaaggttaacsagaatcaggtaaggagaaagttgacacgtacataccaacaggctgatactatttacctgtgggtgaaaaattgtatttgtacatgtattaatcaatgttgggtattttttatgtaagatatatagctttgtttaagatgtgtcagttacttattgctgtgtaacaatatcagaacacagtggtttaaaagaacaaccatttctttgcttatgactgtggtttcggctgagcccagctggggtgttcttggatggtctcccctsggctcttgcatgtagttgcaatcacatggggaccccttgaagcatatgctcccaggtggccttgctcacacctctggtagtaactggtggctgtcaactgggcaccttggtttgccttcatgtggcctccagtagaccaggctgggcttcctagtgaaatggcagcagtatttattaggcctaagatttagtgtcgcaagtctcagtctgagagaggacttgaagaaattgttgagcctggtcgttgtcaggcttcctggagattcttcacatcagtctgcaaaggtttgctttgattgattcttaatcagtgctgcacttcaaaaatgtggctgggcacggtgtctcacacctgtgaaatcccagcactttgggaggccgagacaggtggatcaccagaagtcaggagtttgagaccagccaggccaacatggtgaaaccccatctctactgaaaatacaaaaaattagccaggcatggtggcagacacctgtaatcccagctactcaggaggctgaggcaggagaatcacttgaacccaggaggtggaggttgcagtgagctgagatcacaccattgcactccagcctgggcgacagagcgagactctgtctcaaaacaaacaaacaaaacaaaacaaaacaaacaacgtaattacatcaagacaaaatgtgtttatatcaaatgttaataggttcaagatccctaagaggttatcatgggccgtgaaatcaccctgtatttggtgtagaactcagagtcaagcctcctctgggcctctgtggttgaagccacgtgccatctgcagttcctcatttatgtaaatttgggttttatggctacttggcagccagcaaacaaaggtggattccaatggttatagcaaactgccattttcagctagtttcaaatttttgtgtccttcgaaataacatttttttctctcattagtggactgattttataagaagtaaaagttctaaatttagactactaaaacaaaaagaacacatttgtcttaacttactatacgttctgcataagacctctctgagaaaagggtcccactgctgacaacaaagcaaaacaagaagggttggaaaaacccagcgccctagactattctgttatctcaagattctattgcaattagattagtttgcctaaatggttttttttctttttttttttttgagatggagtctggctctgtcgcccaggctggagtgcagtggcgtgatttcaggtcactgcaacctctgcctcccggattcaagcaattctccctcctcagcctcctgagtagctgggactacaggcgcctaccaccacacctggctaattttttgtatttttagtagagacgggatttcaccatgttggccaggctggtctcgaacccctgacctcaggtgatctacccaccttggcctcccaaaatgctgggattacaggcatgagccaccgtgcctggcccctattcttaacactgtctccaagaggttgatcttataactcacctcagtaacccattatggagtcttgctgtttccagtcttgagttttatacttgattgttagtacatgttcattcttgtccactgtggctgtgagaagtaaaaagtggtcatgaaaagtttcatgtgatctcctgtaatcacacagcattataggtatgattatcacacatttgacttccctggggtaaaggccagtttgattcccatcactacaagggtctccagggaacagccattggcctactcatcccaaacattattgatagaacatttcaatatcataaaataatccacgtcacattgtccaagagtagcgtactgattagtcacaattaaaatcgtgaaatgaaatcacactggactaacagcaaggttgttttttgaagagattagcaaccttttgaaacacctgtaactagagatgccaaatgaaataaacaaggcagtctgaaatctttcaggatgctttagtaacatatctagttctgactgtctttgggctcagccagacttttagtaaactgcagaaatccaggttgggaaacaggcagctcagagttattctaaatagctacagtttgcctgtacagctgacttgggaggaggggagaagaaagggattgctagaaaagggattgatgtgagttttgtatttaatttggctatgacttgaggaaatatacatctcagtccaggtgcaaatcatgtaacctggtatgattacatgtgtttaggaataatcagaataaagcctagaaaagaacaggttgggaagttagttttgggtggtagaagaatggtgaggctgattttgttagtagattgcacatggacagatgaaggtaaagtacagtgccagctccagctgggcctggtggaatccagtatgagtgctgtttcagatgggacaccccaactgggagggaggtggatctagagaggatgtctggccctggcatcccttgagtctcttgcatagctcaattgtgttgatgtttaaagaataagtagggagatttgtttgttttttaaatctagaacataatttctttaagatctttcatttccacaaacccaagttggatttactgtatatgagctaaggaaattggaggttgtcatcttaaggaggcccagatacagttttagaaagaccctagggaggagggatatcacaggtcctcctcacagacacccatagccagcttgtctggtgtgcagcagccacagtttggcatcaacatcctgaaatgagggtatttaagtgcctgcatgtgctactgtgtcctttcattatgcccagtcaccagagttggaattacccaaggaatcgtgtgtgttgtggaggctgagacataaacaccatggctctccccatttcttcaacttccttgtagttcggaggagggaaagcagagccctgggctcatccatcctcactgcagccccaccaggagatcccatcaaggcggtcttagatttctaggctgaggcaagaaggggttgggcgatgagcccagagccacacagcccagccctgttgtggccagagagggaaagggactgactttgtcctgcaagtatggagactgctttcttctttctgttgttttcagtgcaagctatcagctaccaaatggctgccgttttgttttgttttgttttgtccttagagaagcgcccagggatcagctatcgggaacaagaaggtatcactgttttttggggtattttttagattgtccagttttggtcataggtggtttgatttcctttcactgaatacaaagcatggrtcttgtcatcaaacccaaccaaagtcaatctcagtgtcattcgctatctctcttccctccttactgatcccaggagagaaggttagggttgcactagtgatggaacaccaggatgatataaagcttccaacttggctcaagaagagttccaaacaaacaagtatatctgccattgcagtggctcatgatatgtaagtctggactctgtagcttccagtcctcactaccctggtcttccccaccgttcctctctttccacaggccaagagatgcacagtgatcggkggctctggattcctggggcagcacatggtggagcagttgctggcaagaggatatgctgtcaatgtatttgatatccagcaagggtttgataatccccaggtgcggttctttctgggtgacctctgcagccgacaggtaatggaccatgcagccttgctgatttcccacgagcccacgaagggaaaccacgatacttcccttgctcagaagccagccaatttgtttgaaaaacaattgtttcattgtgaaaattttcaaagttataggaaagaacaccacattcttactgcttagaatgaataaccatcatctctgtcacagatactcagctgtgtcctggtagcacaaaagcagccatggtcagcacttaaatgaacaaatggctgtggctgtatgccagtgaaacttgacttcaaaagccgtccatgggctgtattgttccaactgcaaaacaagtgtgtgctgggccacagggtcttgattttttaattgagatataattcatgtaccacaaatttcacatttttaaagtgtgcaattcagtgattttcagtacatccacaaagctgtgcaactgtctcccatgatctaactccagaatatttgtattaccccaaaatgaaatcttgtagccatcccctctcttcccctcccagcccctggccgccactcatctacttcccatctatggattggcctcttctggacatttcatataaatggaatcatgtaatatttgtacctctgtgcctgacttttttcacttagcatgatgttttcaagcttcatccatgttgtacaggtatgaatatcttgaattttattagatggtgccaaatggctcagcaaagctgctatgtcaattttacctccatatccacagtgtggcacaagccccattgcttcacatctttgccaacactgggcataactagactttttggtgttgccattctgagaagtatgaagtggtgcttcactgatgttcagagtcacatgtcctccctgaccaagtaaccagccactctgccactgggtgatcggctttcaggcttcctcctgtgtgaaatgtttgtctgtgtcctttgcccctttgtctttggggttacctttgcttccttgttgatctagttgggatgccaatcctgtgcccgttgtacttattatggatggcttccctcagcctgtcactgggcccttattcttggctttggtgtcattcgctatatggtttgttgatgaaatattaaggccattgcttccgctgcaaagttacggttgttttctctcccgtgctgcccacacctccaggcctggagatggggtagacatcttycatgctcatcattgctgcctccgaaccgttctccctcatgctgctctaagcctctccagctttgaagaggataccctcagactgtacaaaccccgacaccgttccctccttgtggtggccacccacagccgcctgctccccttcccagtgactccacatcatttctcagtgatttcagctcctttctggcattattattggtgaattcagcgttcatgtagatgaccctaccaatgccctcgcctctctcatccttggcctcctctcacccaatgatgttgccctccactcccctgtcatcaccagtaagcacgtcctctccttcttctcagttgcaggcattctactctgagcactagctcctctctgtccagctcatgccctctagtgcctcagctgtcccgattccttaaccccacccagacatccagccatgcccaccatggctcagcctgttcgtgcctcactgcctttagttccctggtctgcttgttcgcttgcatagtcttcaccccttcccctttctcttctggttgtatgtatccataaagtttctccagagaaacaccagcagggggatgtgtggagaagggcaaggagagagatgggtgggtgagacggagaaagagaggttgagatttaattcacagaattggtttacatgattgtgggggctgactaggcaagtctgaaatttgtagggcagaccagaaactcaggcaggaattgatgctgtggtcccacgttagaatttcttcttacagaaacctcagtttcacttttaaggtctttgaactgagtatatactgcctgtccagagtagcaagggtaatctccttacttaaagtcagctggttgtagatgtcaaccacagctacaaaatacctctacagcaacacctacactcgtgtttaatggagtcaccggggaytagagcctggcccaggtggcaaataaatgtggccaccacagtgtacttcacattgtaacccccaccctggttaaatcttgccttgtgcatggccatggccctcaagcagacccttggtaccaccaagcaccatctccacaaacctgcccacatccacgtctctactcagcctcccctgctgttcccgaggacgcctcatccccaccaaagtgcccatcctggtgccagctggaagccacctcctcttccctacccagtcactgccaccagggaccttgaggcaaccatatctggtggttgaatctcagtcctcctctgacttggccctgtagcagcatctgatgctttctttgcttgccttctgagataccacctcactcatttctcctcctgcctcactgattgtctcctgatcactatcatttctaaactttgcagactccagaacttattctcttttcttctccaagtttagacagtgtcacagtgactccatcccatctcatggattaattactgtctagaagctgatgtgctccctgcttgttatctccaacccctagctctctcaggcacgtgtgtgtgtgtgtgtgtgtgtgtgtgtgagcgtatgtgtgtgtatgcctgctggacatccctgtttggatacctcatggacacttcaagcttgctacatccaaaattaagctcctggttccctgacgcaagcccctcccccaccacagcaaacctatttctgctaagtcttctctatctccataaatggcctactctgcttttccagttccatcaaccaaaaaccttagattcatccctgcccgattcctttctctctcatgcccttcatcccatccatcaggaaatcttgttggctccactcagaatagatccccaatccaacaacttctcaccccttccattgctgccaccctggtccaagccaccatcactgtctcacctagatgttagagggactcttaatggataaatcagatcacaccgccctctgtacagaagcctccagtggcgtccagtcccatgtcaagcaaacagaggcctctgtaatcacccatgaggccctgcacggcacgtccccactacctgtctggcccacttcctcccacacccgcctcatggctctgccccaggcacactggccaccaaccaagtttctgcctcaggacctttgcacttggtgtcctttctgtcaggaatgctcttcctgaaccacagaacttgctccctagcttcctgtaaatctccagccaccctgtgctaaggaacaggcccccgctggtctcccttactctgctctagtttctgcataacacctgccagtacggacgtcctctagatttacttgtttgtttgcttatttgtcctgattgaaacatgattgaccatgagcggatacagagcagaggaaatctctgaaatttgtcctctctaccatagaatgtaaactccacaaaagcaggaattttgtttttcgatcactgctttgtcccctcaaaggagacgagaatccttagcaagctttcacttctctccaaaaggctcccccgctgccatgctgttgttgctagtatgttatttcagctttccttgagtacagatttcaagggaaccctccagcatgccatgttgttctccagccacactcaactgctcagccgcaagcgtggagaaggggcgagttgcatttaaccagggttggagtttactagacaaatttaataaagggagaggggaacaaggcaaaggtggtgctggtggatcatgaaatctaagctaagtccaaggtcgatgtgatgtgggtgaaagacatggcaggagaggaccttttttattttattttattttattttatttttatttttatttttttagacatagtcttgctctgttgcccagactgtggcacaatctaagctcactgcagcctccgcctcccaggttcaagcgatgctcctgcctcagcctccctaatagctgggattataggtgcccaccgccacacccggctaatttttgtatttttagtagagatagggtttcaccatgttggccaggctggtcttgaactccttgtatcaggtgatccgcccgcctckgcctcccaaagtgctgggattacaggtgtgagccactgcgcccagccgagaaggacttttaaaatgtactttcacctgggtgtggtggtatgcacttgtagtcccccagctatttggaaggccaaggtgggaggatcacttgaggccaggagttcaagactaacctggactacataacaagaccccccccatttctttttttttaaaaatgtgtttttatagtcagtagagagagagagagagagaggagagagacagatatacatacatatagataaagtttatgtatatatagttatatagttttatacacacaatatgtattacataacacttttttttttttttttgagacggagtcttgcgctgtcgcccaggctgtagtgcagtggcgtgatcttgactcactgcaaactctacctcctgggttcaagcaattctcctgcctcagcctcccgagtagctgggattacaggcgcccaccaccacccatgactaatttttatattcttagtagagacagggtttcaccatgttggccaggctagtcttgaactcctgacctcaagtgatccacccgcctcggcctcccaaagtgctcggattacaggcatgagccaccgttgccaccgcgcccggcccatgacacttttaaagtcacctcggtcttgtgcatcttttgttgctgacaggaagtctactctcaagccggtcgttgttcgtttgtaggttgtctggctttccctcttatggtttttaggattttattttttatcatttatagtctatagagaatatatctgggcmtgagttttagttttgattttaaatcttaacacctggtaggcctgtgcaatctgaagatgaatgtctttcctcatttctggaaaattcttcaaagattaactctaccccttttctctcttttctctctttctagaagccgtgctggacatatggtggtctttcattgtatcatctgtctcttatcctctctttcttgcattccttctctttctctttttgtactatttcataggagatttcctcctccctgcctctgctcatggccaatcgtgtttcacctatattcctcctcagattatgttgaagtcaatcctagacatcatatcattttatctgcaaatatttcagtatttgtctctaaaagataaggattatttttaaaaacattgacagtagttccytagtatctagccagcgttcagatatccctgaatgtcttataaatgtttttgtattattgtttttccaaataaggaaccaagcaagatcaagactatggatttggttgaaatatttagctctcttttaatttacgattcccttcatttttttaaacttcagtctatttattgaataactgatgtttagtagaaaccatgtttatggtgctgtagtatttcccacagtctgggttttgccgattacatccccattgcgtttaacatgcccttctgtcctccagtattttctgtatactggtagatctgggatggcgctgtccattaaggcagccattagccacgtgcaactattgggcacttaaaatgtggcaagtcagaattgagaagcactgtaagtgtgaagtccacaccagatttcaaaaactacctacagaaaaaaggaatgtaactgtctcattaaagttaatttcacctttttctttttactttttaatgtcattactataaactttaaagtcactgtgacttttattatgtttctactggactaaagacttgatcggactctggttcagtttttccctctggggtattattacttctgatactccaatagtaataagcatgcctagtgctcrgatttgggtttctatataccatttcccataaaaagaactagggcttcttgggaaaattgctcattctaggaccctagggcaagggcagtacaaaatgmgtctgggacattttcttagcacaaaatgaatggggacctgccaagaagatacaagagccaacttgaagggcttcccctggccaaatttgggacattttgagcattttgagcctctcaaaacataacagtagtggatgacaatgcattttgatttcaaaaagaatccgtgggctgggtgcagggctagcgcctgcaatgccagcactttgggaggccaagacaggtggatcacctgaggtcagaagttcgagaccagccttgccaacatggtgaaaccccatctctactaaaatacaaaaaaattagccgggcatggtggcatacgcctgtaatcccagctactcgggagaatcgcttgagcccgggaggcagaggttgcagtgagctgagatcatgccactgcactccagccttgccgacagagcgagacaatgtctcaaaaaaataaaataaaaaagaatccatgggtccatagaaatactgaaaataacaattggggtcagggagaaggggaagctctacagaggaatgccaactaataaatgtaaaggccatgaattaaaaggctagacttagaatgtcaccattttatacccagtacattgattattgttccaggcaaggactatcaataaatgctgaggttaattggtagaattaacatgctacagattacttatcaattgcaaaggaaaaggtacctttttgatggccggaatctggcagccatcatcatcaccacgtgctccaacttaatatcaccaaaagtgggacagacttgcacctcctgaggtaattccctgagaaggacacaccaccactgatgtggtattcttgccaaaaccattaagcctgaatctaatcttgaggaaacagactaatccaaactgaaggacagtctataaaataacccaaacccttgaaaaatggcagcattaaaataagacagaaaagaygggaatttgtctcagattaaaagagatggaagagacctgaggactaaatactacatgtcatgcgcaattggatcctggaccccaaaacaaaaggctataaaagacattactgggacaattgggggaatttgaatatagactaattattggataagaacatcatatctgttaagtttcttgagtgtgatcattgttttatggttatttaggagaatgcttttgttcttaggagatacctgtgaagcgtttagaggcagcatgatgtctgcaacttacttgactggtttcaaaaaaaaaatcatgtgattgtatgtagagagaggaaattgtggcaaaatattaattggcacataattgtcataattgtcttttggtgacaaacatgaatcatacttagatcatattacttaattaaggtttgacaaaatgatgacatgctattagtcttcatttagtagctccagtctttataccttaatgcagaataaatatttgattctttccctttatttacctgaatttttattcttgcttgtggtcaagctgtcccttctttgcccagtgggaacctcttcaggttggcmcttgagtgcttttaacgtgaccccggtagtcttagctagctagcatcctcactctctggtacaaggtgtgcctggttcctcttgtgtgtttcctgtcccagatctgcaatcagccatttctctcaggagctcttgttccttttagcagtaaatcaaacagacctgttttaaaaatccctttcaggttgctgtattgtgtcaagtttcacaggaaggaatatgcctgtgtattggctatttactgtctttaatggtgtggaactttttcatgtgattcataatttctatctgagttcaccttcctrgggagttttacctcctaggtgcctgctctgaaccacccaaaaggatgttgcctctgtgtggatcccacaggcttctcatgccccaaaccccttttgactggggactagttagtggggagaaggtgattaaagggacaacttggtttccatcccatgtacttcggtatcattgattcttttatgagaatgtatttccatattgattatagaattataagacaaggaacctacaagccacaggttggagggtgaaaacatgagaatgccattgacctgtcaaagcaggaatgattattttgtctttctttgcttttccaggatctgtacccagctctgaaaggtgtaaacacagttttccactgtgygtcacccccaccatccagtaacaacaaggagctcttttatagagtgaattacattggcaccaagaatgtcattgaaacttgcaaagaggctggggttcaggtaaggggaaggctggagtgagtgctgtcaggagcacgtgatggccctttctaagggtgcaaggccgtagttcttgcagtctccctgggcctaggcggggttgcttcttaaagtgttgggaagatcttagaaatgaagcccttggagtcactggagatggtgaaggtctgcttgccaaggctgatttgagatgtaatattctaactgcacacaaatagaacatctgaggacctcaagcctattggccttcagttaaagagctgcagaacttagacattgcttatatttttattgtgataaaatatatatcacatacaatttaccatcctaaccatttttaagtgcggagttcagtggcattaagtacactcacaatgttgtatagccattaccaccatccatctctaaacctttttcttcttccctaataaaaactctatacccattaaacagcaactcctcaatcgcccttccctacccagcccctggcaactacccttctactttctgtctctatgggtttgacaactatagggacctcacagaagtggactcatgtagtatttctccttttgtgtctggcttttcaccgagcatgatgtcctcaggggtcatccatgttgtagcatgtgtcggaatgtccttcctttttcaggcagaacaatatttcattgtatggatgggccacattttgtttattcattcagccatggatggacatctgtgttgtcttcaccttttggcaattgtaaacaatagtgttatgaacacaagtgtacaaatatctgttcaagtccctgttttcaattctttcaggcatctacccagaagtagggttgctagatcatatactagttctacgtttaaccttttgaggagccaccacattgttttccagaccttgcttatattttaaaagaaaagcaaactgtgtttacccttagccaatagaaacgtgttataactcaggcctgaggggatacgaattttctgcccatcatagcttgctgcatcgttaccaatcctggttcttagaattgtctttagaggactccagccactggctaaaacggctccctgtcagctcagtatcctgaccctcacagggatgcatgccacaggtactgcataaattaagagaaaaacttgaagcaagccagggggttcctctcccaacaacctgtcctggcactgttggctggtccgcagcatcctcagccggcccagcagggttggagctcttctgggcttgggccctggaaaagatcacttataactgacccctagcagttgacaagatgctttgccctgctgaagttttcacctaattagctcctcgttgggtgaccaggggctaaacgatgtctctttgctagtaaatgggagaggtggggtcaaagcagattctccaagtcccagactctgcactcagccatgctgatgtaactggagccctgggaagggccctgctgctctttgttaaatggaaggttgggggcatacaacaaagatttgtgccccaggtgtggcggctcacacatgtaatcccagcgctttgggaggccaaggcaggaagatcccttgagccaaggagttcaagaccagcctgagcaacatagcaataccccacctctacacgaatttttaaaagccaggtgtggtggtatgcacctgtagcctcaactgtttcgggacgctgaggcaggaggatcgcttgagcccaggattttcaggctgcagtgagctgtgatcccaacactacaccccagcctaggcaacagagcaagaccttgtctcttaaaaaaaaaattaaaaaaayaacaagatttgagaataaaacagcacctctccactcaccacagcatttaagaaacaacattactggcatgtgtaatgtgtgcccatcctcgatgccattgctctcttcttgtagccatggatagcaattctgaatttgggtttatttccatttgctccatgtgtaagcaatataaagtattggattgcatgttataagattttatacaatgatatcttattgaacagatcctcctgcaacttgcttttttccccagtgttatgtttttctttattcatcttggcatatgtaactctggtttatttactgaaggggcagagtggcttagtgggtaagagtgcagaaagtgattgctgtgttgtattgaaggaacattttccaacactgagatcaaaagattatttaatgtactttttttcctcaaaggttttaagtgttgctttccacatttcagtctttaatccaccaggaatttatgtttgcttatggtgtgagatagagatctaactttcttccatgtgtataaccagttcagtgccatttattgcataatccatcctttctgcatcgctgcacaccatctgcagcatgtcttaggtgtttgtgtcttacatgggcctgttcccaggctctcccctctgccccattgacctccctgtctgcccatgcagagaagctctgcctttttaggataagtctcagtgtaccgtagataaatcacgcccccaaccaatttcttcaaacttcacttggctattctgagccctttgttcttctacatatgtttggcttaaccagttccttgctaaagccagctgagactgctgttgtaattgtgttgaacttgtaggtaattttggagagaattgacatctttcccatattgagtgttcctgtccataaatatgggatatgtttctgtttatctcgctctttaatgtcatcaatagagttttatactttacttcgtaaagattttgcatatctcgttaaatttatttgtatgtacttcrttttttgttatttaataactttctattacattttcagttattgctaatatataagacgagttaatttttgtatattgatttttaattcagcaactttgccaaacgctaatattttctacatatttgcctgtgttttctgtgtagatttttctctcatctgtaagcgatggaagttcagtttcttttcaaatcattataaattcgtgtttatcttaccctaccactctggctagagcttctcatacaatgttgaataagaatgggaacgatatgattcatgctaatggtgttcagtgttggatgagcttctcttaaccagcaggctggaygctggggaccctcataagagaatatcttcctttagaatagcatttcttaagaggtcgtgtggtgtgtgtattcctatgtgtgttcacatggccaggtcactatcagaatagccagtgatctttttcagacatcttcctagaagtttgcgggctgcccttcacttacaacagagaatcgctgtcatagtgagataccatgaatgcaagtctattctatctctcaggtgtgatgggatagaaaaaatgtgttatcccttgttttgaaaccaagatctcttgattcttggttagaatgtaatacatagtgtgtctggaatccacatagctgcaaaagatggtgatctttggattattttaagaaggcatgaaaagcaaaggcattgcagcaaataatttcttcagtgcctcgaatgcgagggcaacaaagggatgcccctgattctctttcatacaggatcatgcactgtttgaattgtgataatttgtgacttttattttttctgaccttcctctgtcagaaactcattttaaccagcagtgccagtgtcatctttgagggcgtcgatatcaagaatggaactgaagaccttccctatgccatgaaacccattgactactacacagagactaagatcttacaggagagggtatgtaccttggaactggttgagtgagcagactgaagggtttagaatcctaagaaaaatgtttatgaacttatgaagtttgtattctgaggcctacgtacctgatttgagatgtaaaatttgtgggtgaaattaaatttaaaaatactgtgagaggccgggcacggtggctcacgcttataatcccagcactttgggaggccgaggtgggtggatcacctgaggtcaggagttcgagaccagcctggccaacatggcgaaaccccatctctactaaaaatacaaaaattagcccagcatggtggcaggcgcctgtaatcctagccacttgggaggctgaggtatgagaattgcttgaacctgggaggcggaggttgcagtgagccgagattgtgccattgcactccagcctgggggatagagagagagagacgctgtctcccaaaaaaaaaaaagttactatgagaacagctttatgtggccagacactgttctgagtgttttccaggagtattttccttgtttaaaggtcacaattatcgcatcatcaccagattatagatgaagactgtggtgcacagatgcacagagaggctcagaacctttctaaaactgtgcagctaggaggtggctgaccccaggcagtctgtctacagagcttacagcccaccctcaatgccatgggagcttcctcgcctgctatgggaatttacagcagttgcaagcgtgcagacaggaatcaggctggaggcaccttcctagtggcactctcaccccctcccttacttagaaaaacaaacaacggaaggatcttgctttattttaaggaaaaagtacttttccacttggcaaaacagcttcatcaaagggcacctgattttagtatggttggattcagccacggtcgctaccaagccttcaggctgctggggctgtggggcccctgacaactgctagctgcagatggggattgtcaccctgaggccatcctaagctgcaggccaggagtgctcctgagcctgggatagctcgtcttagctgggtagctgtgagtatacccctcccaggtgtgtgcagtgtatcacacccactgaggttttctcgcaaagccggtacatgctgtactggagctgaacactgacctggctacctgagagccagctgcctcctggctgtttgccgtattttttttttttttcttttttgagatggattctcactctgttgcccaggctggagtgcagtggcacgatctcggctcactgcaacctccacctcccaggttcaagcgattctcctgcctcagcctcctgagtagctgggattacaggcgcgtgccaccatgcccggctaatttttgtatttttagtagagacggggtttcaccgtgttggtcggatggtctcgaactcctgacctcatgatctgcccgccttggcctctcaaagtgctgggattacaggcgtgagccaccatgcccagcctgtctgctgttgcttcagctcagaaagtcctggcagaactggtccacagggagacacaagggccacccagaccaggggtggaggcttgaactttggcaagccacagtcctggctccagactatgctgtcttgctccttggagcactcatgtgctcgaacttggcccaaggagtactaaagcctccctgcgccttgcaggcagttcagtcaccatggagaccctgtgtattctcaacccaatatgcctgatwctgattgccaccagagctgagcccatctaggctcaggagcttcaaatgatggccttggcccagaccatcagtgtctcgcttatatcaacttttgggttctcaactggaaataagcaaagcctgcagatgactccagcagtaactcaccggaagcctcctttcagccgaggttgacatccactgttggctttataaccttcctactgatcataaaccaaatgtgatggggagctaggactccttcacctctcttccctttagtagtagagatgagccttggtggaagccatttgagggtttatttagtcatttcctccatcgctgtggggaccagagtcctggcgggaagaggagggccagctctgggaatctgttgagaggcagcttttccattgttgagttgcttaagatcactggggccaaaacatagaccagcactttgctaccatagagtagaagaaacccgaggtgacatgacagcaggaaccgtacttaccaagcatacagacacgcactgaagcaactcacatgggccatctcgtgtaattcgcatgcagccccgtcagggtaggtacctttatgatcaccacttttacccacgataaaacaaatcctttggaaagttttgttacttttgaggcgaaacccatttcactgtgctttagactcttgagttctagtttgtccatgaagtcacacagaagtcaccctttccttgcggtggcaacaggagcactggctctggaccaggcactgctctgaggactttacatgtctcggcctcctttgccccccagctgctggcctgtttctccccaggcatggtcttcagacccttcaccttctctgaccctcttctgggcccacttgggtttctcagagccctcccctcggaggtgatactcagaattgcctggaacagacccggcctggtggaaacgtgggcggcacatgcagttcaagtcactggaggctcacggctaacttgtttgccagaacctttggacgttttccacaaactgctgccgaggcatgtcttctggcagtgttggtggattttagcctttgaacgcaaaccagggccttctgatttgatcttaccagtttttgcccagctgtctgtcctgcattttcagattttggtgtgagggtgggtggggtagagaggtagcccagaattataccagccactgatgtaggttgtcagctcaaggcagaccactgctcagtggccacatgccagcagagtgtgtcatctgtctgtcccccacgagtggtgcttctcacccagcgaggcactctcttggcttgggcctaggaatttgcaatggacgtgccccttctcccactctcctccagscagttctgggcgccaacgatcctgagaagaatttcttaaccacagccatccgccctcatggcattttcrgcccaagggacccgyagttggtacccatcctcatcgaggcagccaggaacggcaagatgaagttcgtgattgggtgagtcagcccacagcggctcttccctagtccttcctggtccatgctcgcattcagagagcacttggcaggagccacatggcattgtagctcttttcttatgtgactgtcttggtccatgcaggctgctgtaacaaaatacctaagactgggtaacaaacaacagagagcttggaggctgggaagtccagatcaaggcgttcccagactgggtgtccattgaggccctgttcctcatgagtggcaccttttcaccatgtcctcacatggtggaaggggcaaacaggctcccttgggcctcttttatgaggacactaatcccattcccgagggcagagcccccatgacctaatcaccccctaaaggtccctcttcacagtaccattgcactggaggttaagtttcaacatatgaatgttgcggggatgcaaagattcaggcgatagcagtgaccttgtccgctgtcctctgtattcatttcttgtagttgccataacaacctgccacaaagtaagtgcttaaaacaacaaatggattctgtcacattttgggaggccagaagtcctcagttaagatgttggcagggctagtgtcttctggaggttcgcagggagcgtctgttccaggcctctgccctagcttctgctggcttccagccatccttagcattctgtgcttggagaggcatcactcctgcctctgcgtccctttcacatggctgtgttccttgctttctgtgtccaaatttccctcttataaggacatcattccctggatttaaagcccaccctaccccagtatgagctcagcttaactaattgcatctgccgagcccctatttccaaataaggtcacattcacaaggcccaagtggacagaagctttgggaggatactgttcaatccagtgtaccctctcaggtaggctgggaaggtatttgtgaccctgtttggaaattgaagaaaccgtgactcagagggaaagcaatgggccccgggtcaaaggccagggcttgactgtccttgcatctgggaaggcaggcgggggcattacttttctcctcgggttaagtgcaggtggaggggcctccacaggggacaacagtgtgcctctctcccaaataggctttctcttccttcatttcctccttttctcctctctctcttccttcctttttccctctgccttgccttcctgtttctcactcagcctcactgctaccctgacttgtcaccttgaaggattacagggagactggtcaataaacggrggaccagagcaaggcgttggccccgtgtctcctgggaaggggctgaaaagctgctacccaaatcgggacaggagagacagcaccagtgttggccatgctggaatgggtgggcaggtcccccagctttcagattccactaaccctgaagacccaggagtcccggcccagtgtacatctttaaccagtacaggcatccatgagtgcctgggccggccttgccaagtgaggtggcagccattctgtaggtcacagtctctcaaatgccaagacttgggagtggccctggccttcgtgcaggggctcccagcacgtattccatcatcccttgtgcacctgcagaaatgggaagaacttggtggacttcacctttgtggagaacgtggtccatggacacatcctggcggcagagcagctctcccgagactcgacactgggtgggaaggtaaggcctgctgcaccggtccctgcacaggtgcctttctgcgggtttcttctccttgccattggatttgctggcaagttgctcctgtgatcctgtatcatggaggatctgccttaggaccccctgtgccaagatcaagcccctctgatagagcatgtggtgtcactgcagcgtcacatcacttgggcagccaaatttggagagctgaygagctgggattgaacagacattcagstcacggtcatctatggtcccctgacctggctgcccacctgttggcatggctccttgtggcaggagcccacgtagattgggcagggtgcttgctcctcaccctttctcccactcattcctcaggtctctccctcccttgctgtttggtcctcttttattctcctgaacctctgccgtttccccactgataaccttcaaataagttgggaatagggtgggtgtggcattttttttttctttttttttttttgagacagtctcactctgtcaccctggctggagtgcagtggcgtgatctcggttcactgcaacctccgtctcactggttcaagcgattctcatgcctgagcctcccgagtagctgggactacaggcacatgccaccacgctcagctaattttttgtacttttagtagagacggggtttcaccatgttggccaggctggtctcctgacctcaggtgatctgcccgcctctgcgtcccaaagtgctggggtgacaggcgtgagccaccgcgcctggcccgggtgtggcttttgatttaaaacaagcagaacaccgtcaagaaatgtaatatgaggaattcattgcatccaaagatatgtagatgagttttatgatgattaacaattatcaaattaacaaatgtgcctttccaagtgcaatctatgcttcatttaaaatcctggcccatagatgaaactttcattgtctgccctttctatgccttagcagttgtgcaattgagggcaggccacgtggaaagctgcagcaattaggcagtgagaatgcgatctgcacgggcttaatagatgcttcaactttgggcaggtgggggtggtgtttctaacttcttgttcttgttctcccrccaggcatttcacatcaccaatgatgagcccatccctttctggacattcctgtctcgcatcctgacaggcctcaattatgaggcccccaagtaccacatcccctactgggtggcctactacctggccctcctgctatccctgctggtgatggtgatyagtcctgtcatccagctgcagcccaccttcacacccatgcgggtcgcactggctggcacattccactactacagctgcgagagagccaaaaaggccatgggctaccagccactagtgaccatggatgatgctatggagaggaccgtgcagagctttcgccacctgcggagggtcaagtgagggacactggaggctgggctctctcgacacgttgctcagccagtcactccttcccctgtggattgatgaaataacatcctttgaatgagtttgctctgagcctgtgactccttctgctaggcagagagcgcaccctactctttccgtgacgatgagggcggcaaaaacagacatttcttccttcatggaactggatttggatttcttgaagcaggcagcttcatattataccgatttgttctctgtctttttgtgtctctctgtttaccccctcccttgccccctcttctggtttatacatttcattccagtgtccttgtacataatcaaggaagctgtaggaagctacaacccatttgttagttctgatggagaaccatttccatgcagaccaatactagagtgaagcctctagactttgttcaagatactctatcttcaaaatatcccagaagaaaaacagaagctgttaacacacaggtgagactttacatatacatttcatactgacagtgagcttagagcaaaagctgaaagctgaaatgactgtaattcctccccagtctctgttgcttgttcaactccttacatgttccacattctctttcaggtacgttgccgtgcctgcctgcattgttttttgttgtggtcgttgtagagacagagtctgagtgtgtctgttgcccagctgagagtgcactggctaatcacaggcccaatcatagagcactgcagccttgaactcttgggctcaagcagtcctcccatctcagcctcctgagagcaaatgtgcgccgccacagcaggcttgcactgttttcacaaaacatttctcttatcaacagagttctgttgttttgagaggcaaggcagtgatccagcccagtggcaccctgtttcatctgttcagctcctctcctaatgtgggacactgggctgggcgacagtaagccagggagcaggaggggctccttccctgcagctcaccctcagaacccttcaggccagtttccaaagggcatagcgtagaggataattcctcggaatgaggagagactgtgctgccctctgctgatggggcagggggatataaacataaataagacagcctttgcccctaaggcacttagaatcatggacttaagatatgttcgcaagcccctgtaatgccaggcaggacatgatacacacacttaagacgcagtggtgaatgttcagcttctgtcgaggaggtgatgccttgagtcggaccttgaagaatggataagcagtgagacttcactgtcgaagttggcatttcaggctaaagatgtcagagggtcacagtcaatggcatgtcatagtttaattagcagcacgttgtgtttcttaggggtccatgagataacggtgtcttagattcagtgaaggacagacgtgccagcctggtttggctgatggtgcaaagctgaaggggatgtacttttatctcccaggcagtggtggccaagaatcaaggaaaccatcgtggctcttacgtggagccttcagacaagaagcaacaaaggcccacgcgatgatggagttgggcgggggcggtagggttgggggtagaaatgaagccttacaagaaatggcctggagggggtccgcgctcagcacctgatttcctgtggggagtgagagggagggaggaggccactcaggctggaatgaagccgcagagcagctctaagctggtgggaggatggtgtcgggcccggagtgggtgaggccagcagaccttgctgatgagcaccaaggaccaaactgccctcagcttcgacctaaccactcgctcagaaaaatactagctgccatctagaccaaagatgtccctcatggaacctcttctctgccctctcttcactcattagaccacagataatcgttgggccctgccctgcgcttcagtggtgaataaaacacgcagcccacagaccaatagattattcaaaactgctgaagtttccaaaaaagaaaagtgcagggtgctatgagagggacatagggctgcaagcaagcctggcccaggtggcgatcacggcagaacagttgcagaaacagtgcctgctcagatccgaaaggtgaggctgtgcacagagaccctgagccccccgctggccaagctgacgacctcccagccgctccttgtatttccctgcattcctgacccacacctatctcgacccacccgtttggagaaagtctaaccaccaggaaaccataacctcagtacccgctgagagcttgttagaaaccatcaggccccaccccggagctactgaaccgagaccctgggcttgggccagcactctcttcacaagccctgtggatggtttctgaccagtgaagaagccttcctgcagatcactgagtccagctagaacctccccttggctgctgcaagactgaacttgccctactcacaggcccagggcctgggggccacccccacccatttctttcctgacagctgatggcatcctagagtgcggacccaggcctatgtctgtccctcgtgtcacatcccatctggagaatcggggccaagggaaggcagttctctcccagattggggacagctagaagccctattgccaagtgctgcgtgtcctttgggatgatcgcattcaatccctcttccttcccttccctatcgacactgacctagttcagcacctgaccccatctgcacctaggtcaggtgtcctgggacagccgacctgatctgtctgcttactttcgcccctcctcccatccagctgctatgtgtacacctagggtatccagtctctctgctaaaaacactaaagcagggtccgattttctcccagcccacatttccagctccttccactggtcttcacacctgctgtgttgtagccaaatggaaccacggtttcctgttcacgccctgtcatgcatcccctgctcaggctgtcatgactgcatgcgatgtcctctccccactgtgtcccagctccagaatggcccgttcccttcccctaaaaagccatgcctaatcctcccagttggaaaccacctcttttctctggattcccagcctggggcccctgacctgtacctcattttgtgtttcctatttgtgctttttcctgcccccaccaggccaggagttcttaaggacagaggcaatcagtgtccccacagcatagtgggtgctcaggaaacctccctgtcttggaatcctggagtcacagtagcaacaaaagaaagtggtcccaggaatggggaaaggcacagcccatgagactgggttgaagcagagagaggttcccaacctgccattcagatggggcttgaggagtctgtgaactccctaaattcgatgcagcctctgggggtgtgggtgtgtgtgtgtgggtgggtgtgtgggtgtgtttgtgggtgtgtgtgtgttggcatgaaagggcacatggctttcaccagcttctcaaagaggactgtggcctaataaaaactagtgagtggagggggccagcagctgtcgggggaggggccaggagagacatgccaagggcagagtggggctcccaggcctcatcgtcacccctgtgtgtgtgtgtggctggctgttccatcatggggtccatggcttcaaaacagggaagcactggaatccacgaggaggagggcttgccagacaggatggcaatggttgaggcctctggccccagccctctgggctctggtgcccattgcccctggaagattcttagctttctggatgagacagcccttgctagtagaaagctctaccttctgctgaactgaaacaccattggatgtgacttcccttgtcctccctcatttcctccctcaccaaaccccagcaagtgcagcttacacaggtgctattccctccggtatcccgcagctcatcagcagcactgtcctctgctcagctcacctgcctcagggcacctggtcctgcagggccagccactcttcttcaaactccatctccaacatcatttcttctttgcagctgtcccccacaggtctctctggcttcatacaatggctggcctacatctccatcaaagcacttcctccatcacagggcaaccatccacttagctgcccagatagagctctatgaactgctttgctcctcaagggcttttgattcgttacctgttccagggaagtaagcatgcccagttcatgtgccaagactccaagggcatttacaggagaaagccagcaactcattggcaatctgggggagccccagagaaaagaggccatggccaagggcactcaagggcagttagcagagccagggctggaccactagctcctgatcccccaggccagcgcaccccaggtcacccattcagatccaggcagcctaatgccacataggtgcccatgtgggaaggaggcagtcaggatatgggctccaccctgaggttctcttaacatgaagggctgaaaaagcacaaattgatcattaggaactgtgagaaagaagatatgttggcagacactagaaccttccattccagtctgtatctcttgtcaccagcactgcctagtcattgatcgtggaaggctccaaaagatggtggacccaaagtcgagactctttgccagctctgcctcttaccggctccaggaggtctgttcatattaactcattcggcccagagaatttcccaaagaactttctagagtgactggggtaggggagaaaaggagggaagaggatggaggcctctcagcttcttttgtcctgtatcacagcctggctcccagcaacacttttgggatgcctcttgtagcaggtactgggagacatgcacaccactggctttgttctccatggtgggcagggggaacatcaattcaaaacattttaactgggcacctgccatttccctcaaagagctcacagtcccatagaagaaatgaaatgcagaaattaataacccaagcactccttcctttaagagcagaggtcagcaaactatgaactcaggctccaatctcgcttgccacctgcttttgtaaatacagtttcgttgtcacacaaccacatccatttatttacataatgtctaagactgccttttcactacaatagcagagttgagtagttatgacagaggccatctagcctacaaagccagtcaaaatattgactatcttgcccttcatagaaaaggttttgtgatggaagaatgaggtcagagaaaaaaagaagaaaaggaaaggtttgtcaacctctgcttaagagggactgagaggccacgagcacacgatgcttagcatcactaatcattaaggacacgcaactcagtaccacgatgcgacatcgcctcatcccattaggatggctactatcaaaacaaaaaaataggccaggcacaatggctcacgcctataatcccagcactttgggaggctgaggcgggcagatcacttgagatcagaagttcaagaccagcctggccaacaggatgaaaccctgtctctactaaaaatacaaaaaattagccaggtgtggtgacaggcgcttgtaatctcagctactcgggaggctgaggcaggagaattgcttgaacctgggaggcggaggttgcagtcagccaagatcgcaccactgcattccagcctgggtgatagagcttggacttgataactccctggagggtgacatggtgacatttgtgtttggatggtggggagagtgcagggagagggaccagaggtggggcgccagtggggaactacctctagtccaggggagagacggtaagagtgtgtctgtcctgaggaacaggcaacggggctatggtgcagacgtaatgaagagatgattctgtgcaagaatggaccatccatgatgattgattggatgtggggctaagggaggggaagggataaagagaactaggaggctgaagcttagaagaattggtggccagccatgccttctgctgagctagggacccaggagaggatgagatataggtagcagcaaggaagaagctgaattccattctggccataatgagttgaatgaaccttgcagtttccaggtagaaaagtctagaaggcaagagatagttatttcggacatcttggcttattgctgctaccgaaagccacaggaaaagcaggaggatgaaaaaaatgggaccctgagaattaagaagtgaaccaaatacccaggtgtcaaggaaagctagggaggagggatcaagcttgagaggatggtcagcagcgtgr

SEQ ID NO: 95885 - DNA, 56657 bp, Homo sapiens
  misc_feature (1)...(56657): n = A,T,C or G
acagtggctgcaccgtcttccattctatggcggtgcttgtttgaatgagaattctgggccagccctggagcctctgaaggcaggcaaatgtgtggtctcgagcttgactagacacccagatcccccaggggttggggtgctttatagcgttctggtcctcccgcttctgaatgggaagctctggacccaagactctgtattcgtgaagttccctgagtggggaggggtgcccacccaggtctggcatgggctgccgtagattagagtagagcgctgggccacctaggggccaggagtgctgcagaagtgcatccacccaaaggcgcaggctgaatcgggcaacctcctgggctcctgccacctccagggtgtttctgtgggttccagaatcctccttgtctggacccttgttaacgaggacttccaatgcctgtgtctttctgcggcacccggcgccggacaggcggttgctttggctttgcacgcagctgccagtgggtccccaaggtggcccctccggggctgccctgcagggcagagcttcaggcaggtgggtgcatgcaggagtggggagggggcgccatggtgatggctattgtttttgcccaaagctgttccaggcatgagagccacttgtcatgtgtacagattgtaccaggaacagggggaggaaggaacagagcactgggggccggtggggggcagagggggagcctgtccctttaaatctgttttctcgggttttatttccttctcttttcccatcctcctccctccaccagcacaagtggagccgtgagggcccaggagctgcagcgacggtgcctctgaaatattaatgaggctgttctctgcctcagctccttccctcccccttccctggctgcatgcaggccttgtccttggaaccctcctttcccctcccaggtggtcgccaaggtgcgtcaagcagaggggagggggcaggggcgggcaggaaggagagggcctggcgcaagggcaggaagatgtggggaatcagggataaaaggggtctcccaggtgcacaccagccaccagcatctcgacctgcctaggatcatgccaggcccaggagagggcagggtggctgccagactgggcgccctccttccgtgccctctccccacctgctccccagctggtctaggggcccaccccgggcctgacctacgaggcctgggccacacctctcgctgttgccttggcttgcttttcctctctgggttctgccgggcctggcctgtgttctaggagcctggaggtggagagagatgggggactattgttttaaggaatccccgtagtgagtcacgtcgctgagtgatgggcccttctgaaaggcgggcccttgcttggtgggtctgtagggagcaggtgacggacagtctgccttcaggagggcccacggtggagggcatgtgcccaggtaggcccccaggcgtccacctcctgccctctgcccctgagttctgcttccttcttgcttcggggccacggcatcctgggcctggctctggcttccagatggtctgaatgcccaggagccgcatgttctcatcactgagggtccagtgactagggagtgactcgggagctgggacttcctggcagtacatgccccatcatccctgtggggatatatgtccacgcagaccccagaaactgaaggggtgctcgactggggtgcagtggggctgttttcaggaaagagaatggggtgaatcccgatgcgtgcatcacctgagatctggaggacggtggtgggatctcgccctccatctgttctctcctccataaaggcggagcaggtggccgagtggaatgcagcctgggcctgctggggaggctttcaggggtgtcatcagagcgtcccagcaagggcggccatgacccacctcaagtcacatggaaggcagggctgggagaaccagggcaaaagcaggaggcttcctgagcctcagtttccccctctgtaaggcagggagagttctcctggccctcgtagggtgtttccaagggtgcagtgaaagaaacatgtctgtcaagagctggcatgcagatgtgggctcaaaactcagtgtgtgccatggggtcctgagaggrgccccatgggagcgggggtgccccctacttagaaagtgccgagccttctggagcatgctgggctgcccagggcctggaggaagtccatgggggactaagctggaggtgccagcagagcccccaaagccagggagggacaacataggggaaagaggacccctgggtctctggtcaggtgggtttgagtcactgggtggggagtaggcactctgagcctagttgggaggtgagggtgtctgggccctgctgaagagaagagtccagaaggcggttgagtaatgggcctggacttgggccatcccctccagcagcccctggaggcagcagccagggacccccctggctgtctcccaccacgaggccggccagtctgtgcrgggatggtgcaaatgccggaaggtgcgaggccccctctgtggaggttctcatttcaatgaagccaattaaggtcagaaagatgaaagagcacagaaatggtatgttccctgcccttttggtgcctacagaccattctcggcagccagcccaggccggaaactctgtcaggcctgcagaactgataggcctagtcacttcggttcttggccatctcggcgatggctgctgtctttattgggcctcagggaggccaccgcccaggcttatatagaacccagaaaagcaaagtatatgccatttggtctgcacagcagccaacagtcgctctaaatgggccttactctaactgatggatcctgtctgccctatagcctgttgcattcatgaagacagtgagggttagcagagcaccccgaccccaccctgtcctccaggatggagactccacctcccaggactccaagttcctcccctgtgggccaggcccccattcactcattcctccaggcccccggccacatgcgggactgaccacgcggtagacttcctgccgactccataccacgtgtctcaaagagcttagggcccagctggtgggagacaagctcacagatcatcgcagcgccaagcagagtgaaataggaatgggtcgcgggattatagactcaggcgcaatcagttttggctggggaactggcagagactcctggagaatgttccacttgaattgtgactaagaggattcatcggaggtcagcaggtggagctggaacagagggcgtgcggtcggggctcagagctggcagggctgtgtggctggggtgggagtggggctgggaagtgctcagaaggaatctggccttttgcttgatggggatgggagactgaaacaggggctcgctggagtgatggtgcctgaaccaggaaagtggtgactcacagcagggtcatgaccagttgctggactagagagagacctaagaggtggtccacaggacgtggagcttgcttgctgaggggtggggatcctgcagtggggagggccaccagggccagccgaggagaaggaagttggccccgggaccatggcagaggggaggactgcctccttgcccactgccctccccatgagtcactgtgggtccagtcagacacagccatggctgcaccagtcaggagcagctgtacgacctggtatggttctgtctgggccaccgctgtggggtcaggggcagggaccgggtgggggaggacagagctggccttgggtatgccatggtcagaggagggaggatgagcacatgccaggggagggccaccaggcctcggtgaccgtgccacgaggaacccctgctctgaggaacaagcatttctgtcatggccgtgtgccacccaagagcctaccacacaagccattcactctgtcacccgctgggggcacagagcctgaacctgacagtggcacaaagttgctacatggtgggattgttgaggcatgaggtgactggagctcaggaaggcagggagaaggcgccctggcaggtgcaccgtcacaagcaaaggtcctggggtggggaggggaggctgtctcgagaagacgaggagtccaggtgagagccgaaagctgccattgctgccttgaggggtcagaagtgggacacccagctgtcctctggctctgccacttccccaagccagcctcagtttcccgcatcagaaaagcaagggcaattcgtccacacagcacccccagaaggagcccgcctcacctgggacagcttcgcttgctgtcctggccccctctcctcagctttcactccttctagtcttttccccccaatgcctgtccccagacgccttgcctcacctttgccccagctgcaaccccacagctcttggccctcgggcctgctgttctccctgtcccagctagagagggacggggttagttgaaacttgttgagcacctgtcccagcacatcaagccagtgccaggcatgtagtagctgctcggtgaatatgtgtcaggtgaccaactgcaagacagggcggggagaggtggggagagaggacggcacaggcacatggccatcattttgtccccacatctcccagaagtgaaggctgcttcatgtgcaatgtgtcgcgagagtaaacgcgcaggtgcccacgcttttcaaacatgggtcactgtggatggatgtttcgtgaagtatccaccagggcctctcctgagaataaggccatggacttggccgtgtctgctttggctgcctgagggctttctcccctttcttcagggctctgggccactcgtttccaacggatgcttctgagccaggagcttccccagagacgggggktcagggccctgctgagctgccaggagggctcttggctgatgtcaaggccaggccatgtgcactgaggccatttcagttccatgaggatgtgacaggcttagctcgggccgggaaggagcggagagagaggagctgcagtgggccccgccaaacactgtgatggctgcagaaggggcagcctgggccctagcggatccttgggtaaggtgacggggacagggagagggatgacaactttgcgatgctcggcagagtggggccagggccgtggcctggatgctttcagtgtggggagactttggctccttactttgtcatctggagggaagaagagcgtggaggggagtgggtggcaccatgctgtgggctgggacgttggcagactcgccagcgacctgtggctgctttggctttctcctgtgtaccctctcctcctctcctcctcagccactccctttatcccctccctcttctccctccctccatccccctttccctccctctctttgcctttccgtcttgtccctctctcccctcccctgtttcccacccttcctccgggcctcctcctttcctcgcccctggccccccaggtactctcagggccacagaaaccgtgagccactaaggccacaccagaagaccaccagggactcatggcatgcccgctgcacagggcgcatcttaaccaggcaagagcagggagtgaaccggagtgaacaagcgcaggactggtggtggggcgcgggcaagaccagccactgatcagtcccagcacgctgccctcacttcagcgtgggttcccgaatggatctggggggcagtgacagcctctgcctccagctagctagtgttagccactgcagggtcctggcaggaggcatcgacacttcccctcccccacctgggcaagccctccaggttctgggcacccatggtgggcaggacccgggagtggcctggctggtggggcctggcagagcatgagggccactggcccagcctgggaggtgatttctgcacttcgagggtcatggcacagactgagtgaagatttgccgagaatattctggaagatgggacctcagttttgtctcaaccactcccctggcttcttctcgcctccatctccccaggtgtccacgcttagcagctttctcaccgccgccaaaccttgcctgggcactgggaccgtgggtggccgcctgtccctagctgtggctgagccaagattgcacttgtgagaaggcctgacaggcagcatgggcgacatggccaatagttccatcgagttccaccccaagccccagcagcagcgggatgtcccccaggctggaggctttgggtgcacgctggcggagctgcgcaccctcatggagctgcgaggggccgaggcgctgcagaagatcgaggaggcctacggggatgtcagcgggctctgccggaggctgaagacctcacccacagagggtaagtccctctcaggctgcatgccacccagccctgctcccagccttcagaggagcgacctgaaggcatccttagccccaaggctggccagggtcaagggccacctgtgcccctcctctcagccatttcccttgagggggagatgccctgggtaacctgacctgaccccctcatctccacacctccacaatcaggagttctccgctctatagagcgagactggggagggggagatgggaacttcatgggacacacacacaggcggaatgggccccaaacagaaacccttccgaggaacagggcagggcagggcagggaggaggaagacagccccatctgtatatttggggatttccggtgtgctcaaccctgtgttcacttaagggggatcagaacaggaggaagggatgcagggtgcaagccttcggagtttcgggtgaccggggcctctcctgggaagagagaggatggcctggggatggcacaagccatttgggtctggcaggaaggggtgaccgaagctgggtcacrggaggcccagagtgctgatcagaggtggcactgactggccacaggctgtcccaaagaggcacaagcccagggtagtgtcggtctcactgctgagggaggctctagaaagcccggtgagcactgtctagaaagatctggggcggaggcctgactatccctgtgggaggcaatgttccacccggccttgtgaggcctgcccagccctggttgctgcggtctgccatgaagcggggacccccaggagccaggcccagccccagattccaggagccacagcattctctggcrctgcgtgcctggcagggctgctggggctatcccagcctagtgccaggcctgttccccagccagtgcgggctgatttgatctgctgcccatctgggcaacgcctgggcccacccatctcctctgctcccagccgtgaggctccttggcacctccagcctcccgctctgccctcaccctcaacccagagactgttctcttgtggctccggcctcggccccgtctgtctgcaggtggcactcaggctgcagggaggagtgaagatggaggaggggggctgcgggccaggtcaggaactccagggtctgcctgggtctccctagctttgtgccctggagctgatgcgcccgtgacacccggcctcgccgccgcacacgccctcacggtgcagctgctgctggggctgatgccttggctctgctcccgagcatctcttgccttccctcctccttgcccagcccccgaggaggctgtggagggccatttatccacaagagctctggcctctcccagatcaaaggaagcagatgggcctcagctgtctgctcttcccctgtctgccaggccttgttaaatatttaaaatgtcaaggcccctgggaacctgcccgattctgccatggagctcaggagctcttgcgtgcctgtggaggcaggggcacggagaagggcaggtgcacaggtgggtggcttggcctctgacgggcttccaagcacctgggtccccaaggccacagtgcagggagccggccaggcctggatctgctgcccacagaatgagcagcagaggaccggcccctcccctcttcaaccctcaaggtcctcgggctggagctgtcgggcttgagctgtctgggtgccaggagcgggtgactcgctccccgcatcccctagcccggccgtgcacccggaccctggtgctcagacctgcctgcccctcagtcctcctcagacacaagggcctgagccacgggggcagctggctttgttgtgccccaagccccatgccaatcccctgacaaggtgggcagacgtggggctgcccaggaggcaggcactcccccgtggggcaggtgctttatggcgcatagtgcattgcgggaaggggactttatcttctggcggtacactcatcaatccactgccctccctgtcttgggagcactccaagaggattccagaacccatcctggaaaccgcgctgctgttgtcaggaaacctgggtctcaggctgaactcagaggtgggttcgcccgggaacctggccccgcccagtgcccctctgggctccacaggcagttctggaaaggagggggcggattcgctgggagccgacacgagatgctcctaatccaattctgatggcatctggcctctgctccgggcaggccgcccatctgtgtccatgccaaccggccagcccctgcccccatgccctggacctggactgccctcgggcctgctggggaagcatgtgctcagagccagaggggccgcagctgtgttcctcctccccgtcaatgggtgctgcagtggggcagccgtcgggaccccgagcccacaggaaggctaaggagaaacgagcaaggctacagctgcaagggcaggtcaaggccaagggagaggctggcgagggcgagggagctcctggggaatgggccaggggtcccggctgctctcagggacaaactgggcatgtgaggaggggcaggcaggagagagactcgcatggaggctccaggctaagggcagtggagaccccaggtgtctggggagccctcccctgctcctctccctccgcagaagccccacggttagcacgtgcttcttcttaagtcacttggggggtcttgtactccctagtactgtccccacctggcttagctcctgtaattccaggagacagtcccagtccagagcgaggtgcacacccctcagttgggtccctggtccccagccccctccccaccacccaggagctgaggtcgtgcgttaaccccaggctcccgattggggcaggctcgggcctcagcaagaggcctttggctcctgaagaaacctgagccaggggcagagaggcacggacagctgcggctcttctgggtggggaggacgccatgtggccgtcgcctagctggggtgaatgagccacggttgtgcgggcggcagcttctgttccactgcggccagggctacccctgcccctcctcagaagccccaaggttagcatgcgcctgttctccagtcatctggagggtcttgtgtgccttcccagacccactgtgagtgccccatgggctggggctgggctctctggtcatcccgtccctgcagcagatggcaggcgtgagccyagctgcccagggctgggagctgcaagctgctgtctgtccaccaggtgtcagtgtgggtcyggtcacggccgcgacagcactgggcgccgggtgagcgcccgggagggctcctcgggatcagccggggctgagaatcctggggccaagggtggggccagaggagggtgtcatcccacatgcctgccccggtagaaggtggctgagtgggtgtccaggcccggatgccagtcacgcacgtaagcttccagtaccttcaggccaaggaagactgagaagtragcgtcctcaaggatgacaagtgacagaattggatagggacaggtggctctgattgtgaaggcaaagccaatttgggggcttctgagtggctttgggtgtcattcaagtcgccatgtagacaagctgtgagccctggctgagggatcaaagttggtgctggagttgcattagaaccaaggctgctgggtcctgagggccctgtgctcaccgggtcctgtcgggcagcgtaggttctgtcctgacctgggccacaggccagagctctgactcatggttacagggccctctccacctccggcctcagtggccttgtctgcaccctgcagagagcagctgatgagcagcccagggtgggcagtgtctccccgacccctgcgaggccwtgcagcccagaaaaggcttgaagacttcccagtcccctccctcagcaccgtgactccggtttggcttctccccgcctgttccccaccaggaacccactcccattcccgtgcctctctctctcctcgcgtgacaccgttcttcttctttgggtctctggacccaagaacttgcatctcccattagctctcatgctccctccccactgcttcttccccgagaaacttctggaaagtaagcctccgctccctgttgccagcagccacaggcaccctggagactgctgattcctcggcactggccgtgctcatgccccaatccctcgggccctgcccaccctctttgcaggctgtccctgcccccacaggttgggctgtgtgacactgccagtctttgggacyggctggccccatcttacagagctggggaggggggtgttggtgacaagcctgctcagggaattcataggctgggagctagagaggtgtttcctgacaggcacagagccctggcctagtctttggcatctggtgccatcccagcctcccctgattggtggccctccccatgtctccactaaagtcccctggacactcgctctcctccccaggggaccattggctatactcttctgtcctgtctcctagcaacccttgttgacctggacataccctgctgggtcccctctgtgcccccttgttgggtcctgtcccctgccttccagtgccccctcagcggtagtgtggaggtggccaggaaagcacagggacctgggacccgctggagtccaggagcctcctggcctgttttgtcatctgtgtgtcaggaggaggatggctagggactccccatgacagcagccagagagccgcatgctcactcccaygtgcacacccccagcagtctgcagaaaggctcctgtctagagggagagccaggcgctggccagacggccccagagggctgctgccaccccaggagcagtcagtcagggccacataggaggcctgggacacacaaggccgacccgtcccatcccatcctccccttctgtgcttccggggcaccatgcaggcctggcggacaacaccaatgacctggagaagcgcaggcagatctacgggcagaacttcatccccccaaagcaacccaagaccttcctgcagctggtgtgggaggccctgcaggacgtgacmctcatcatcctggaggtggctgccatcgtctctctgggcctctcgttctatgcgccgccaggagaggagagtgaaggtaaggcccgggggcctggrctggaaggaggaagaggaatggggcttgagatgagggacggtcacaggatggtgatgtctcctccactgcttcccttctgtcctccrcacagcctgtgggaatgtgtcgggaggcgcagaagatgagggcgaggccgaagctggctggatcgagggggctgccatcctgctgtccgtcatctgtgtggtgctggtcacggccttcaatgactggagcaaggagaagcagttccgaggcctgcagagccgaattgagcaggagcagaagttcacggtcatscggaacgggcagctcctccaggtccccgtggctgcgctggtggtgggggacattgcccaggtcaagtacggtgagtgccctggtcttcacccaccctgtcaaggaagctcrgctcctgcttctggggagggtgagccagaggagacccccagcacaggttctccccggtggcctkcgtgtcgtcacctgcaggaggcgggaggtggcgggggtgggggaggtgggggaacacggggcagggcagagtggtttcagacacagcaggcccccgaagaatcaactgtccccacagcctccacggcgggctttcccccctacaaaggatgcaaatgtcctcgttccccagarggaggagggctcctgagtccctttcccaggcggcccatggcacctgacgggaccycccctggggcagccgggaggaggcggtggggagaaaggcctctgcttcccggtgctctaggcgacctgctgccagccgacggcgtgctcmtccaggccaatgacctcaagatcgacgagagctccctgacgggcgagtctgaccacgtgcgcaagtcagctgacaaagatcccatgctgctctcaggtgagggccaccctccsggccagcctggcaccaaggggcgtcagcagccgtgtggcccagcatcctgtccaggctgcctgctgggctcagcctccacctccaccagggccttccagcataaccttcaggttgggaatctgaagactccgcccgtcttgaggcctgatggtggcagctccagccacagggcgaggaagctggccctccaggcccrggagagtgctttgtgtcctgaatgggaagccccaagcggagaggcttgcaggggccagcacagcgctgtgcttctctcaatccagaccctcgacaatatccagtgggggtagtgttccctttccagaaggtttcagcatagtccggtgtttatcccagttggaaacgtagtgtgaaacgggacaggaaggctggaggccctaggtgggccctgtgggcctcggggtctcctccaagccagggaggaggcttcagcctagttttaaggtggacaccgcgtccctgcttccgggagaccctgggagacaggttgtgggcgctgaatgtgtctcccactgggtgatacaaattcctgtctcagtctctgtgttgctgttccaggcactcatgtcatggaaggttctggaagaatggtggtgaccgccgttggcgtgaattcccagacaggcatcatcttcacgctgcttggagctggcggagaggaggaagagaagaaagataagaaaggtagcgcagcagtgccgccagtccctggtgctggtggcggctccttccacgctgcccattctttctttgcgggccggtgccactgggggctcagggagagccagcccaagtgggtgggaggccgggccctctcttttgattctccgtggagactcctcttctgaggatatcccccctgagagccggcaggccaagggcccctccagtgccgtggacggggagtttccctgagaccaccatccccaaaggctccgggatcccatacctacctggacaggaatggcgttagagggacaggagctacggggagcctcatgcttaccctcagggcccgtgcccagtaaggtgccgaggatcccaggccagcgtgggaggcagccagggaggtgggggtcagaggtcagaggaggctgggacaggtgagggccgggcagcccamctgtgggtggtggccctgccctggggcttacaaagctaggcaagcccgagccaggagggcccattcctcgtcctgtggctggagctgccaccatcaggccctgcagcgggcggagtcctcagaccttctaacctgagtactattcagggaggccctgatggacaagatygaatggctgccacagccccttctggctgggcagccttgctctggcctggacttgccttctggcctctcctgcagccaaaacatggtagggagccacacccgcatgggaaagctctgcttcctgccagtgacctccagccagggccctggggccagtgcgcggggtgtgggggcgtgggggcgtggggcgggcagtcagggcccggggaaaaggtcagccctgagcccaaagctccctggaggcagcaaaggagtagctggatgaccctctgtggcctagaagcttcgacgagccctgcctcctggcagcctgggcctgtgtctccctgcaccggctcttctttgtggcaccaagtcctgtagggctcagtgcagtgtctcaccccagtgagtgccctgggggtgcgcaggcagatgggcagccctgggcctcgtctgggctgggctggagtccctaggcctctgtcctgggaagcccagctgcccctgcctgggctgcctcctcatgtcttgcacacaatggccctctcccatcgtccacgggaacccacgctcctctggagtctccagccgcccttctcaggctgctcaccttctctgtaccttaaatgagtgtgtccttcctaactgttccaggcctctcctttcttttttaaattgacaagaccattcagcccctcccaggccccacctggccctcctctccagcaccctcaggctgtcctacttaggagtcagagctagagggcttcctggaggaagagaaccctgagggggccctggagggagagcagcagctggccagctgggtagagggtaccagcaagaccagggggctccctgctcgccctccccgtctctcccgccccatccccattgtttggcgcagcctgccaggtacacgcttaggatacttgccttctacctgcacccaaccccctatttcttgtctcttgaccttgactcctatgcacctttctccaagtgtgcttctcctcctcaccttccccccactcctgtctcttctggcggggcccagccctcctcttccagcaatgctcatcccagacttccccctgcctccctcctccagaggcctcccagggcctgtgtgcaggctgggtccagagtccatgcttccttcgggcccccacggccccaaggctctgccatctcccctgctgtgctgtgcggtcatcgcactgccatcttgtgtccgtgggggtctcccctccctgcaagaagggccctctgtgcccacaggaaccctgggcggagagggcctgatcaatgccccacccctggctgagtagggtcggggggggggccctccctgctccctggggaccccggatcccaaccccaactgcctgggagtgcagatgtggcccccaggaagctcctctaactgcagctctcagaaggggtgactgtgcccaccacctgagcccctggatagggccacttggggcccagcctggccttgcagggctgctgtgtgccggggctcaggctggcactcctgtgctgcagccctgggttgaccaatgacctgaaagcgccccgcagagtcctagcgtctcattcctttgtccctttaaaacacacactggggccaggcacagtggctcatgcctgtaatcccaacactttgagaggtcaaggcaggtgaatcacttgaggtcaggagttggagaccagcctggccaacatggcgaaaccccgtctctattaaaagtacaaaaattaactgggcgtggtggtgtacacctgtagtcccagctacttgggaggctgaggcaggaggatcgcttaaacctgggaggtggaggttgcagtgctcaaacacacacacactgagctaactgctggacgtgactgcagggaaaaccaatccctaggcaagggcagctgggtgctgtctgcctggcttccaggggttaggagccatctaagtgaaccccttgagctggtttgcagggagcagacgtcccgacttggggaggttccagcttccgggaacctcccactgccagccatgtgtgacccagggcccttccaaggctggctttaggggttcactgtagggctgagcttaaggccgaaggggagccctgggcagaggtctggctcaggaatgccagtgttcatggtgaccgtgtgctgggaggtggtgacggggtgagcctggagaggacggggcatgaagaaggccaccagcaatcaggcccctcctccccaccccctctgccacgcggcccccaggctggtgtcctcaagccttcgtgtctgtcatccctcttccattgtaggcaagcagcaggatggggccatggagagtagccagaccaaaggtaacgggcgccgctgcttgggcacaacaagcttggagccctgggggtggggctggtggagggcacagtgttgggggaggttcacctgcctyggtggcaggagcaacacttggagaccaggtgagtgggctggctgcacagtcccgtcccagtgcagagggaggagagagcacacccctggggctgctcagggcatcctggccacagacactgctggcagctcagcccagccacctagaggagaccttagcccagcatgggcataaggatcacctgtgagtgggcgccccgagtccactctggccagatgagaaaactgaggcccagaagggctgactcacctgaagctctgggtcccagtcagtgtgtttcccaggccagcttcctttcagccaagcctgaggacctgggagacagagtggtcggctgagggccagaggcccggctctcctctcagccccggacagctggcaggtgccgacaccctggggccagcatgagcctggctgtgagacgcaggaagcaggagaaggggtgggaggagcggggaggaggccagccgtggcccacggaggacaggagatgtcggccaatgcagcagccagctctaggtgctggagtccatggggaacaaggcaggtcctgaccctcaggaaggtcacaggcagagatgacccaggcaacgccctgtgcggagctgggtttgggagggcagtggggggacagcccgatggctgcagccctgggttgaggaggtggcagcaggtggggcacaaagctggaggggcccagctgggtggggcaattgtgtcctgacgccactgggaagaggagccgtggcgaatggccttgggctggcaagtgaggaggagcaggaggaggcagaggtgatggcggtagtgccaagagccccagtggatcggggaccagagtagtgagggagaaagacgagtctgctctccccaggtcgctgcgtcggtcccggggcagaagagggaggtggggtggccaggattactctgggccgtggagtgggtgcggccagagcttggcagggagggagatgaggaagtgacagaagcagaggagtggggagaggagggagccggagtgggggacacaccaccaccatgtcgagggcagcaaggatgaggagcacaggacccaccagggaagaagggagaggagccgtctgctccaggggagaggcagggagggtgctggagggacagatggagcccgaacaggcgcagggctggctggtgggaggagagtgcatggggcttctgggcctccctaagggaggtaggaggtggctcggacaccagtaagcagatgagtcasctcagggttctggaagattcctcgggccacaggcctctgctctcaggtattatttggggcattccaggaccagtcaccctgtctgtgtgcccaaaagccttgtgctgtgtctgtcctcccttctcccgagagaaccatctctgtcccacctagaacagtgctggagccaccccacccaccccaagagggcctgggcttaggaggcgagagaagggaagctgatagacttggaaataggagagctccactgaatcccgtctcctctctatggtgtggcatgtctttcccccacaaaagccccttataacgccttctccccagccaggcactgaccttggccatggggttcctctgtgtgcagctaagaagcaggatggtgcagtggccatggagatgcagcccctgaagagcgcggagggtggggagatggaggagcgggagaagaagaaagccaacgcacccaaaaaggagaagtctgtccttcaggggaagctcacaaagctagccgtgcagatcgggaaagcaggtagggacagcaggaggkggtgggcccaggccattgactgggcgtggaggatgctggsctcctggagatgagcccaggctgtgtaragcaggtgggaagggatgtggcaggtgatgtgtgggccaggcaggcaagggcacaggccaggccggcagtggccatcagggcctggcgcagcccttccctagtgagcagaagtcccaaaccctcgacgaaagcccgggtcacacactgagccactgcccatgaggtgcccctacccaaggctccaggctctgccccggcaccctcaaaaggcagctgggggcatgcagggctggtaccccaacttctggggtgcagtgggggattgactcttgctagtcctccccagcggtgcttctcctgccatcagaccacaaagtccactccccaaccccagcagcactccagaagaggccacacagagcccccttgcaaacaggccccagctcacctgctgagccaaacctgggctgtttatcctgaaacgcaaggcaaatctacaaggccttcacaaatgcctccgagaccgtgtccatacctcttcttccctcttcctgtcyccctccttccctcacccgtggcaacccctttcgtctcctccccgctctgtggcagggctggtgatgtctgccatcaccgtcatcatcctggtcctctactttgtgattgagacgtttgtcgtggaaggccggacatggctggcagagtgcacgccggtctatgtacaatacttcgtgaagttcttcatcattggtgtcactgtgctggtcgtggctgtcccagarggcctgcctcttgctgtcaccatctccttagcttactctgtcaaggtaatcataaaacttacagttgatactgtttacagactcggaaactggggtaagaagtcaytgggcgccttggtggcagtataaactggggacgtttgggatagctcaagggaggagaggaggtgccgagcagggacccagggggcagctttgctgatctgtcagctcaggtccctcggcatgagatgggccagaaagcaggcaggcggtgagatacccaggggttcagcatctgcacaatgtgggcagtaggacggaggggctgggaggcagcggggaagcggagaatcagcagagggcccgggacactgggaggcagtgggaggaggtggggggagccaggtgtggggtggtggggtggtggggtggtggggtgggagagctgcagggctggtgggtaactgagagggggctcgggcaggggaggtcccgggtgcgcatcccgcccccaccattggatgaggttgctgatgccttacagcctcgctattggctcagggctgaccaggtgcccagtgggcttagtgccacacgtggagctagctgagcagaacagagtcacgcgatgtttgtgttgacatctctcactcctccaccccaacaagcacctgggccaaatgcccacaccctcgccctttgcagaaaatgatgaaagacaacaacctggtgcgccacctggatgcctgcgagaccatgggcaacgccacagccatctgctccgacaagacgggcacgctcaccaccaaccgtatgaccgtggtccagtcctacctaggrgacacccactacaaagagattccggcccccagcgccctgacccctaagatcctcgacctcctggtccatgccatctccatcaacagtgcctataccaccaaaatactagtgagctggggcaggagcgggcgggcagggccgggggcaggagcaggggagggtcctggccagggtgccaggtgagctgttgcaaggtgctcattaggcccccccttgagaacttttgcccatccctggcctcacaggtggctctggctgggaaactgcctgtagctaaggccgaccttcctctgctccctgccgcccacaccctaacaatgtggtgaccacgasggggcagagctggggctccaggggcagcatggagggtggtctcaggcccccagtgcctgctagccctcgtcatcttgcagcctcctgagaaggaaggcgccctcccacgccaggtgggcaataagacggagtgygccctgctgggcttcgtcttggacctgaagcgggacttccagcccgtgcgcgagcagatcccggaagacaagctttacaaagtgtacaccttcaactcggtccgcaagtccatgagcacagtcatccgcatgcccgacggtggcttccgcctcttcagcaagggggcctcagagatcctcttgaaaaagtgagtgagcagcagggaggtgccggggtacgcacggagtttctgattctattgtcgtggtaaaagaggccgaacgtaaaattcaccatttcaaccactttacagtgtacagttgaatggcattaagcacgttcacaatatyatgcaaccgtcaccactacccagttccaaaacacctccatcaacccggaaagaaaccccaggcccatgagcagccctccccacgcccctccccagcctcatgtgcttcctgtctgtatggatttgcctgtctggacatttcctatcaagggactcatacactgtgtggccttttgtgtctggcttctttccttagtgtaaagtttttccgtttcccycagatattagaccttcctttctttttttgttttgttttgttttttccctcaagccatcctcctacgtcagtgtcccccgtagctgggattacatgtgcatgcyaccacgcccagcraattttcaaattttttgtagagctggggtctcctcatgttgcccagggtggtcttgaagtcttgggctcaagcratccacccacccggcctccctaagtgctaggattacaggaatgagccactgccaccagcccgaacttccattctttctaaggctgagtaatatccattgtatgctaaagagcattgtgttggtccatccatcccttcatctgtctaccagcacgtctaccagcacgtgagtcgtttccaccttttggctgtcacgagtcacgctgctgtgaatattcacgtacaagtttttgtttgaacccatgttttcaattcttttgcgtggacatctaggagaggaatggctgggtcgtggtgtccacgaaactgttttccacaggggcagcaccgtttcacattcccaccagcgacataggagggttccaccttctccccatcttcaacagcacttattttctggtgtgacaatgctgatgggggccatccttgtgggtgtgaggcaatatctcctggtggttttgatctgtgtttccttgatgactaacaacgctgagcctcttttgctgtgctgactggccatttgcctgtcttccttggggaaatgtctgtcctagccctttgctcattgctgagttgggttgtttgtctttttattgttgggctgtaacattttttctgtattctggatcctagatccttatcagctatgcgatttctacacattctgtcccattctgtggcctgtcttcactctcttgatagtgtccttaggtgcacaaatgttttaaatcgtgatgacgtccagttgatctattttcttgttgttgcttagagatgatgaaaattttcttagagatgatgaaaattttctggaattggagactggtgatggtcgtgcagctctgtgactatactaaaaaccatygaattatctactttaaatgggtggactgtgtggtgcgtgaattatatcccaataaagctattagaacaaagtaagggagagtgcacagcgtcacctccaaatgccctggcttccccactcccactcagccttcccggactccacacccttggccttggcgtctctgtccacaagtcacctcgctcctcatgactgccgtcccagggccctcagggcaaggtcctctgcaggacgcccagggctccccaaaggcccaggcccacgctccttcctgtgttctgcggactggaccaccaagtgcaccctgcctggccgccccacccacagcgctctcccagaactctgccaggtgcagcgctcactgccagggccaggaccacctcctccctggagccatccctgctggtgtggggrmctcagccctctttctgtgcttcttttttggtgggcactgagggacactgaggcactgcggacaaaaggcccagcccagcttcactcccccttactcccatgcctcagtttccctggtggcatggagatcacagaatacttatctctggggaggggtgtgagggttccgtgggtgaatccacatccataggaggcyctccgtccacacagcttctgttatgatcatttccttcgtcaccagcctcccatgcagtggcagcacctggcactcacagccccactggcttcttccaccatgcccgcctctgtgaccctcggctcctttgctccctcctctccccacctgaatcctcccaagtcctgtcccttttgagaagctcctggagtcatgagcgctctactgaggctgtggctgcctggacgtggttatagcgattgtccacagacttcagtttttgcccaggttccacccgcttgccctatgaagtctgtggtggagctgccatgagccacatgctcctgcctccctcccggtctctcagcctgcagcagtgcatgagcgtccyggtgccctcaagcaacagaaatggattctcccccagttctggaggccggaagtccaaaagcagggcgtgggcagggccgaagcgcctccaaagcatctcagagaggatgcatcctgcatcctccagcttctggtggtggctgccagtcctcgcgttcctcagcttgcagctgaccctctctaatctctgcctgttgtcacacgcccttctccctgtgtgtctgtgttctcacacggggcactcctctctgataaggaccccagtccttgactaagcccccaatccagtgtgaccagcrctgttccttgttgttctctccccacctccacctcatctctgcccaccccctgcctaggtgcaccaacatcttgaacagcaatggcgaactccggggctttcggcctcgggaccgggacgacatggtgaggaagatcatcgagccgatggcttgcgatggcctccgcaccatctgcatcgcctaccgggacttctctgcaggccaggagcccgactgggacaacgagaatgaggtcgtgggtgacctcacctgcatagctgtcgtgggcattgaggaccctgtgcggcccgaggtagccaccaccttctctgtgagctgccctggtaactgtgccctctgcccgagcttgtccggactggtaggggcggccttccttcacacacagctgctgcggtccctccgtagtacacttgagccccgtcctgggtgctctcaccctgacacccgcacaaagnctctgtcctgcctgctggaaagcccttcccgcttgacctatgggcccagctcaggctccaccttctaccaggtgagaaggtggcagtggcggagagaccgtcgacatttgggatctgatccacccaggaccgatggactgraggtggtgctgaagcctgaggggacacaggtttggggcacagggtgggcgtttattggttgagggtttggctggggctactstayggtcaggacgtcctgtggcgagctcacagcaaaggtcctggcgggaaagggagcccagaagcatatccccatatggacgatgccaccaggggagtccagatgaggggacctcgagggccgcgtggcagatgccatggccttgacactgggaagtcactttgttgttgaaagatcccagaccctggagagtgtggaggatggccggccccggagggagaatgcaaggcatggggtgcccctctgtctccccagggcctctgcatggcacccacctgtgtcacaagcagggccactgtgaccctgacaacttgtctttgtaggagccaccctgggggtgcaggtgcaacctgggaggagaagcttctgggctctccttcgggagacaggcattcatgtattggatcatgtagcaaaaacactcaattcaaagacagtgcgtctaaacgccagccatggctcatgtcaacagagcagccccgtgccccgaggagaacatggtcactgcgcccagagagggagcacctcgagcttgccctgggagaaaatgggtggtagcggaggacaggggacagaagtccagcgagggaaatgggccccgcaaaggcgggcagcggcatgagtcccgggccccactgagcctgggagagcagaaggagagggtgctggtgaggcgaagcaaggccacacttggggacaggagccatcgagtccctctgttggaccagggagcaactgaagcacagagcagaggaaggaatcttgccagaggggcctggggaatagggacagctcctttccagcttaagagtggctgagagagagtccaagkggtagaccacagtgacagggccaggctgcggaggctgggcagacccccacaaagactggccagcctggtggtggctgaggaggacgcacagaaggcccagcgaagtcctgggtgccggcaacaggcagtaggacacaagggcctcactgaaaccgccagggtgcttggagatgcggcacggctgcagccagaggagggcccgtgaggctgggccctggggagccataggaagcctgtggctggggtggtattgatgctggagctgggccggccgggggcactggcaacttctccagacacctggctggctgctgtgctgtggggccttggggagaaggcagggagcagggctgagcaggygaggaaggacagcctggcctggccctttggggccatggggaaggaactgggctacacacactgggcctgaggagggaggaggcctgggttcgcagctgctggttttcaggctcgtcacggccacttggtggcagcagaggggtggcttccagacttttcagggacaggcattcgctggctcaaaggagaattgtcttcttgtggctcgtgatcttgttatccagcaccccaagatcctcagagagtacgaagtgtccccgaggctggcagtgaggccacttagtggtatatgctgcaggaaccattggatcaccctgtcacagcttagagtggggcccccagctgtctccctggcaaagatcacagcccccctgcccatggcctcagggggcgccaggattcagggactcccaggtcaatgtcctcccctggtgtctcccggctgccctacccctggctcccactcctgcgtgtctactccccaccgccgcaggctccccaggcctggcggctcggccacacctaggcttctacacttacccgacggtgctcacaagccccactgcctaggcttgacctcctcattcaggttcccaaactctgaacctggctcctcttctcctctccccctgcccgtctacctcagtggcatcagctgcctgaccctgtctctctgtccccgagcctgaagagccacatacctcttcatttgggaactgtcttccctgtccccccaccactgggacaatgccaccacctcccggccagtctcctggcttcccgctctcaaccccttgcaggctgttcgctttccactcagcactggggaacctctttctctttctccagaatctaatrtgatgcaggtggtccccaacttttaacaattttgtaacttggtgcaaaggtgatgcacattcagcagaaactttacttcgagtcccatgcttttccctttcagtgcaggattcaatgagttacatgagataatcagcactgtattccacaataggctttgtgttcaatgcttttgcccaactgtaggctaacacaagtgttctgagcacgtgaatcggatggctttactctcacctctgctggaccttgggccacctgcagatctgatggaggaaggggtactgcctcaacccaaaatacgtcttgcctcgatggccccgcccacctctcttgtctcttctaggtccctgaagctatccgaaaatgccagcgtgctggcatcacagtccgcatggtgactggggacaacatcaacacggcccgggccatcgcagccaaatgcggcatcatccagcccggggaggacttcctgtgcctagaagggaaggagttcaaccggcggatccgcaatgagaaaggcgaggtagcacccggctgtctgccaccccagacchcccttctcctcacccyagcyccctgcgtgcccgccttagctctgcagcgtccttgtgcttcccctccccagatagaacaggagcggctggacaaggtgtggcccaagctgagggtgctggcccggtcgtctcccaccgacaagcacacactggtcaaaggtagccgagcycccacaccnctttcctggggtggccagcccgaggttgtctgcttcctgacaccaaaagccaggttcccaaacaggtccccagggcctgcctaggaagctgggtccatttgtcccattagcccagagcagcagggcaggggcccatgagggaaccagggttcggggagggctagtgactcactccaagtcacacagtgagtctctagaagcagtgggtctagagccagggacccaggattgtgtccccaggccctaaccagatccctatcctcccaccctggccctgtcactcagtgagatttgcttacttatttggggataggagatgatccaggtgacggggagcacagataattgggacagtcaggacggggtaatcccaaagggttttcacagccaacctacccccatagctccctgggcagggctacacagggttgtggtgacagatggccccagccctgccctgccctgatctgtcttccagggattatcgacagcaccactggtgagcagcggcaggtggtggctgtgacaggggatggcaccaacgatgggccggccctcaagaaggcggacgtgggcttcgccatggtaagccacctggtgcccgcccagctcaccacggcagatggggcctgcatctgtcccatggacattagctttgtaccaggaagtgggagccagtgtcggggcaggttacagagtgcctgaaggttctttctttcacatcctggccacttgggcctgcgtgggctctgccagtcgggggacatgtggttaaaggcatctgctgtgatgcccaaggtgacagtgggccccagacatactgtggagaggaaggggaatggggggtgggggctcatcactgatggcattgcccacccccgtcctctctaaatggactctcagccccagatgaggtgagcagagtccccagatgtgctcttcctctgcacttccttcctgttgctcacccactgagcagggtagccctgcagacgccacccacatggctggttgcggcccctcagtggccccacagccactgaacgcagcaacctggtgagcccctctccctgccctaccgaaaaggagtgtcacccagggaacccagcccagtccttcccagcacccgtagcccagaagggagctccagcccaagcttcgagaggtggcagctctcacggggccaggcttggggcagaggagaggactgcgcagcttggcacagctgcagctgcgcctccatgggacagggactcctctgcaaggagccgccccgcccagggtgtccccatgcaggacttcccagggctccttagccagcaagcctctctggagtgctaagaacagaccacgctgcttggtggccacgtggtggcagctgggctttatgtgtaaagctgtgttgatgccatgtcatcagyaccctctgtgtttatgagcaaagcccccccccccaccgtgacatgtgacaacttactgtttgtagtacaagaatgtgttgcattaaaaaaaagcaacaaaaaacagtgctgttcttggctttggggggcggggtgggatgttattcagaaggggagagcagggagccagcccaggcgggccaggtgatcaaggggggctggggaaggggcccccacaaacactctgtgtgagtgtgtgtgtcacccccycagggcatcgcagggaccgacgtggccaaggaggcctccgacatcatcctgaccgatgacaacttcaccagcatcgtcaaggcagtcatgtggggccgtaacgtctatgacagcatctccaagttcctgcagtttcaactgacggtcaatgtggtggctgtsatcgtggccttcacaggtgcctgcattactcaggtgggtactgggggctgccatgccccagctaggacacctgggctcaggcctgagggccagattgtgagagtgagggttttgttttctttgctgcagattattttaattgagatcaaattcatatgccaaaaattcaccattttcaagtacataattcagcactcgaatttgtaggacattcaccacgttgtgcaaccattggctctatctagttccagaagattgtcatcatcttaaaaagaaaccctgtgctcttgagcagtcatttccccatttctcccccaaacatcccagcccccggcaaccactcacaggcttcctgggtctatggatttgcctgttccggacatttcattcctatgggatcaaataatatgtggcctcttgtgtctggcatctcgcttagcaccgtgttttcaggctcacacacaccgtagcatagggcaggactttctgccttttcatggcctcataacactccacggcacagactgccacattatgtatgtctgycctgatggacacatggctcgttcccactttttggctcttgtgaatggtgctgccaggagcatctgtgtatgagtttctgcgtgggctatgcgtcccatgggaaccctttctcaacagtcccattttccccattggtgagtgtccagattttcttcaccccgccttagaaagggggtgtttaaattgcctgctgatcaacttggtcttttcaaaacaattttttaaattgagataaaaatcacataacaaacttcaacagaaccattttaaccttttgaaagtacataactccgaggtttatatccctccactgtctattcccagaacattctcatcaccccaaaaggacacccagaccccgtgagcagtcactctctactccccaaaccccagcccctggcacccactcatctgctttctctctctatggatttgtcagttctggaagtttcctatgaatggaatcagacagtacgtggccttgtgtgtctggcttctgtgaggctgatttttaacsaacaactcagaggagctgagaaggaaggtccagttcagagtttctgcctcctcctgcccctgaggtgcaggagacaaggagagcagccctcactctgttgccccaaatggcagaccccatcgtcgggctgttttgtggtctggggtttttcacctcctgcgagggatttggagcacacctgctgccaggtgagagaagggaggcgggcacgtgacagcccaaagaaaacgccccactagcgtaaaggcgatgtagggatggagatgtctgttttcatgggcatgaaatcctggtgatgtggaccccatgaggagcccycaggagctactgggtttccacccccaaccttcccgggcaggcggcccatggaaaggtgactgcctcctctccataggactctcctctcaaagccgtgcagatgttgtgggtgaacttgatcatggacacatttgcctctctggccctggcgacggagccacccacagagtcgctgctgctgcggaagccgtacggccgcgacaagcccctcatctcccgcaccatgatgaagaacattctgggccacgccgtgtaccagctcgccatcatcttcaccctgctgtttgtcggtaggctggccagkggcacccgggaggacttcrggacactgttgccaccacctcgggctcagattctgtctggtgtgtctccacctgtgtctccgcacccagtacggggtgggacgctgcacttcctgactggacagcacacaggggaaggagcagatgggccaggctagcaaccctgcagccaggcctgctggtggcctacagctctttcgcaagcctctcctcccaggccsctgagcagctgagaaacagttcatgtcttgacatcctgcccacggctgtgtagctgtgtagagtaggcagcttctacccagccccagagtggccacggtaaccctaggaacagaacagcccacatttaccctgtgaagattgctcctgtggagtgactggggtgccgtgctggaagctgtgaggtgggtggggggtgaccgcaagagagaggaagaggaggagggcgtccgaggaaagccagccttaagaacttcccttcttaatctcttccttcctgccctcaggctcagggtctggcccctggcccagaggggtctcaggactctggttggttgagcctggggtgggtgtggctgccttgggccwtggccgtgagctggaagtggccatcccctgggacaagggacccatctcgggagctacacaccgaagtctcgctcctgagtaatgcgtcatgcgctgagatgactgtgcctgagtggggaatgttgctttccaggggagctcttcttcgacatcgacagcgggaggaatgcgcccctgcactcgccaccctcagagcactacaccatcatcttcaacacgttcgtcatgatgcagctctttaacgagatcaacgcccgcaagatccacggcgagaggaacgtgttcgacggcatcttcagcaaccccatcttctgcaccatcgttttgggcactttcgggattcaggtaggaggggcggctccactcttggcctctgccacttgcaaaaagtggaggtggtgggcttcaagacccctcgtccacccctagtactggcctccccacctccactcccagaaggagccccaccccacctggctttcctgtagcccccgtcctctctgcatgtcggagagggccttcttcatcttccaaacattgccggccttgccctgggtgagcgcgctggcttccagaagggtttcgtgagccctcatcggaacgaagttttctcacagatgctggaaggagtcctccctggctccctctaggtctgccattcccatttctagcacttaattccttggcatgaggctgccataactccagaagtttcttttggagatgacctctgtgcccagtgctgacacactaacctctgcttcccacagtgctgtggacaggctggtcagccccactgtctaggaggggctaagtgttctaaaatatagtgtatttgtagaaaaattgaggtatagtaaggccaaaaggtcaagagacagttgccactgaaagacagtttatgactcagagaccccaagaggaggacacatgccacaccataggggcccacatgggagagcgccaggcaggaggtggggtgtgagagctgtggacaagagcctttgctgtggttccctcggggaggagcrggtgaggcagkgctggtaggctcaggactggctaggttgcgtcattgcagcggttccagggcatacgggtgctccctggctgtctggtacctggtcctgggtaatgagtgcaaggggatagtggcccggaatgtgacagtccaacagaggacggggtcagtttgcatttggacagcttgcccctgcaaattggatgcctcccgaggaggcaggaggccaagacaaggtgacctcggcaggttctagggtcctccagaatgaggcatgtccagcgtgcccgcagggtgggtgtcacagcctccgtcttgctgaaaataggagcatggtcagtggagctgggccccactccgaggctggagtcagtaggtgcctggcacccaggggcgctgggggccatgcactgctctgtcatcrcgcccccrgccttgtggtcctctcgcaaggagcagcccgtgcaactgggggaaccaaccagggtggctgggtcttcaaggggttggaggacaagggtggctcaggagccgcggctggacctgcctctctcccacttgcccttygcagattgtcatcgtccagtttggcgggaagcccttcagctgctccccactatccacagaacagtggctctggtgcctgtttgttggtgttggggagctggtctggggacaggtgagtgacagccctgcccctcatttcagactgccctgcagacagcttctgtgatgggcccacttgccctaaccctgcttcagagccttggggtcctcaccctaggaagcacactgagggctcaggcctgtgacacaccaggacccagggacaggacgcaagggaaggtgtcagcaaaagaatgcaaaggaacatggctgggatgtgacagggcccaggaaaactgcccgcagctcccctttctatgataagagccaaaaattgccccttccaattgggtgggtagcttgggaaatccccacatattttaaatcaatcaaacagcaccctgatcaataatccatggggcgaaaagaaagtctccagagaaattaggaaatattttgacctgatggaaaggacagagagtcccacatcgagctctgtgggctgcagctgaagccgcacactggcaggtttcyaggaccccacaattagatcaggaagaaacagcctgggtatttaggatccgcttatctctgtcttcatcagctccgactgccatagcaaaataccatagactgggaggcttagacaacagacacttactttctcgaagtcccggaggctggatatccaaggccagggagccagcggggccagttcctggtgagggctccttcctggcttgcagacagccgcctcctcactctgtgctcacatggtggacagagggagcaaggtctctggtgtttcctctcctaggagcattaatccagtaggatcagggccccaccttggtgacctcatttaaccttgatcacttccttactccaaatccagccacactgggcactaggacttcaacacatgaactggagagcacagttcagtccatagcattccggcttttcctttttttttttttttttttttttttttgagacagggtcttgttctgttgcccaatgtggagtgcagtggtacaatcacagctcactgtagcctcgaactcccaggctcaagtgatcctcctatctcagcctcccaagcagctgggaccacaggcacatgccaccacaccaggctaagttttgtattttttgtagagatgtgttgtgccatgttgcccaggctggtcttgaactcctgaactcaagtgatctgcctgcctcagcctcccaaagtgctgggattacaggcgggagccaccatgctcggcctggcttttgtttcttgatctctgtgccggccacaggggctgctgcagctgctgcagatgccagccttcttgctggccccagcattagtgtcctcggggacagcccaccsagttcctgtttcattttcagaattctcctttccctctgctactgcacctcacctccgaatcacacttgaacctggttgctccatggagtcccttcacttcccgaaacctggactctaaccacagcccagaggggtgccaggccctcttcttgctcttcaagctcccaggccactggccttctggtccccccaggaatgtggcaccagcctgtagctcggcctctcagggctactgggttgtccttttcatttttaaccttgttcagttacaaagataaaacatgttcaagagaaaaacgaaaagaagggaatctctgtgaaccagtcctcaagtcccctcctggccatgttcgacaaatacactggcatagacacacaagacagacgagaygtcttgctctagaactccagatgcccatcatccctttctgtggcttcccctgcgtccttctagactgttccccccacttcccagtggcctacaatatgcgaagccatgccctctctttactcctgccaggctccttatccagtcaccctttccagctgtcaccctccttgtcacctcccaccctctctagcccccaatgcacaggtcttctctaggctggtgttcctccaggagatgccctctccaggagagactaggccagagctccagctgtcctctcccaggggagttgcgcaaacagcgcctgtgtctcccagcaacggtgtggagcgacatgcagggagtattgtcaaccagggcagctcacccaggcccyggtgtccagggcttttcttgcggtggttcacagagccatgctgtggtcacgtggctggcctccatctccagccctctggaggtccagctgttagtgtagcctacggggcacggtccccagccccctgccccactgagccatgctgctctcaagcaggatgttccaggggcttagcgatccctcccaggagcccttgctgcaccgcgttccactcgggccactccctgggccctttggctgaatggagctccatggaggatccgcttatctctgtcttcatcagctctgactgccatagcaaaataccatagactgggaggcttagacaacagacacttactttctcgaagtcccggaggctggcccagagctccacgtactcctgaaaatgcatctcagccccccgggggaacactacgccagttctccaagggctgccagttcccggggggactgctctagctttactccctttgcttagtcacaaaaacaaatgacatcctttggaagaaggaggccggcgtctccctctggagagggaccttacrccaggcagatgctgctcagcctggctctcacggccacttccgtgtggctcccccaggtcattgccaccatccccaccagccagctcaagtgcctgaaggaagccgggcacgggcccgggaaggacgagatgaccgacgaggagctggccgaaggcgaggaagagatcgaccaygccgagcgggagctccgcaggggccagatcctctggttccggggcctgaaccggattcagacgcaggtaagccccgactcgctctcgccctggcacttccaccccaagagggtagaggcaagctggccagcagcagccgagagccggccgtctgcacccracacccacagggaaaccctttggtcttgytgccaaggtcacaaaagcagctgccagtgtcccctttgccattccgggctgtgcccgctgatggctgtggcactgagatcgcctctccctgacagctccttcagagcccaggcatcccctgtagctaaaggtgtgtgtgggtgactaatggctctctcagaggcacaggccagcaccgtcctcatcactgctggggctcccttcacttggtgggaacggccccaggtcataggcaagtgacagtatcgggaagagaggcccatttcaaacagccaccagcgagctcaaggttcactggttgacactgtaaatgcgatggggagacttcatttgggaagtggactctggccaccgagttggtcctttctggtcatccaaatcaccaagggttagggccggccaagaccaagggcgtcagctgtgttcctctctgaagtcagatggccaccactgccaccagtatcaggcgcttgccagagctaccatgctcccttgttcccatctcctcccggccaacagttttgccagaatgctccagactcgctgtgtctccacacccctccctggaactctcttgtgatcccactacagcctggcctctgcccaccactccccagaaacggcgctcgcctaggcctgcgaggctcccttccggctcgtggggtcgggctgtccctgcatcgttcctgcctgctgtgggcactgcctggagacttgctgtcctcacccgcctggcacccccacctcctgctcagccctcgccccaccctgctgtggcccttgagtgctgaaaatcctggccggggaggaagaaagggcccatggggaccccacctgcggcctggcccctctcccaccgcagcccctgcagcctctccttcatggcctgcccctcccccagcagcctccagagggccacccagcatgcttcacactccacctccttctgcaaggcctgggccaccatctctcaggtcacagccatcactccctgcccctccaggccctgtccaggatccccagttgcaatgcccctgacatggagcgactgaccctcctccctgaggtcctgccagagtarggacaccactgcacacttggctgcggagccagggcccgcctgagccaccagccccagctcaagcgggaataggcggggcctgaggccacaccccttcccagggtcagtcacacatcaccaagggcctgtcccaaagaatcatccatgcaacttgcacaaagctgttcttggtgccctgggtcctgtgttccctcccagtggtctcaagggccgagtctcaagggacccagcctcagggcaaccccactccctgggcctcagcctcctttgcttgccttggctcagctcagcccctccaacaccaccctctgcagtgggactggtggagcctctctccattgtcctaaggatgaagtctacgctcctgaccatggccttcaagcccctgcctcttggtgtcaccccaaccttcctgcacacctgcacccctgcacccccggctgcctttccaatcatgccctctgcccgcctgtgccactgcacctccccaactcccgctgcgtcccctgggccctcatgcttacaaagccctctttgactcctctcactctcaccacgggctccttgcaaaactttccagagctacagagtcccccagagaccacgatcacgcagggctaggtcaaggggcaacaaagaactccacatttcaagagccccccaggggtccaaggggcctctccagctgagaaccgggaggcgaggctggcatcctaggcaccgaacacagcgtagcctgggaaggatgtgttaggtctggactctgaacactgtcacctatgccctggcctggccagaacacagagagccccggtgaggaaggggagcaggctttgtcgccagatggcctgcgtctcccctcccacgtgcaggggctactgcctcaagcacaatgctcggacaggccaggggtgcagcacagatagtctgttctcgttccctgcaataaatatttctgcgctaaatcttaaacacatcgaatgttagaagcagcattcacatctcccccagtgccctcctagcggcccaactgtgccttctacgagaccatgcctatgggccccccagctgcccccagatgggctcttatctatcgtacccctgttgtgctacagagcccagagctgcccaagcctggggtggggggtgaggacagcaggaccttgcccctcggcggcccacttcactcctgccgccgcagccgaaggcgacgttaggttttccagcagctgagacaacagccctgccctgacctgaagcatcagtggtgtcagtggtaccccggccacctgtgtgtctcgtgtcctctgtatgtgggggccgctgcagcctggctagtagaagcgagtcccatcggtcagagtcttagagttccaggctgttccagttgtcggtgctcacagagacacgggcagctgagtcccctgctttacgtatgaggaaacagggtgcactctttccccttggcaccagccgatccgactcttccacgggctcctgacccccatggcttttcgctttgactttgtcacatccaactcaccatgtttctcaggaatgctgaaccagtcggttcttttagccagctatgtaagagcatctgctctctttgattcgaaacacctgcttgaaaaatggagctaaagcttgggagaagcccgtcaggttgtacgtatgccccaagccaagaaaaacatttcctaggcagctggccccaggtttctgctttttgggaaccacaaaatcgctccccagattttggaggccggcacaagcttttctgttgctaagtgaaggcattttgtaacctgctcgcaccatggttccatactaacatatcaacgcaccagatggacagggtgtcattccagaataaaagagtccttcaaacccagaacatgtagctttctgaagcgctcatgactcggtctgtcttttttgcatcccattataatgcaaagagaagcttcgtcagcaactgggccttgctcccggctcagctcttgggcttccaggtgtggggtggtggcgactgtggtattgtcactgatgtggctctcccactgggacaccatctgtagccaggccagaccaatgcaaatctgaggcaggaaaggcatctttcctrtccctcatcacttttgccgcagcgagagtcctctcctgaatctagacaggagaccccccaccccgcaagccaccgcgacgccatcacatcaaccatcctccttccgtgcgctgacacactcagtatgcattcctcacggtcgcagcaagtgccatgaggttccccttgtgacaagcaagcgagtgggatgtgctgggcggaaggggactgggcaggctgagaagaaggaggagtcctttccacagcgcgtcaaaggctgaagtggcrtacatcctcattttggccggtgcagggggagtctgaacactcaagctgccttcttccacgaagccctggcccgtttcaagacacccaggtgaacctggtggccaccacatagcactgcagggctcgggctggagcaggtagctttgggctccagatgcgcacactggctttgctgttcacatcatctccagtgagacggacatgagtccccatcccagccaagggcaggtcaggaaatccaaagacactgggtcaaggccctcctgcaggcctcagtttccccagccttgcttccccttcaatttgcaggaagctgtaagagtggggacaaagcgaagccacggctgccagtcggtgggaaaaccccctcctccgctaggtccattcttctgctgaagtttcgagggggcgccccctgcccagtcactcagatgagccacagaagctggcggagacgggcaggcggatggagcatggggcataagtcctccgggtttagaggaagcagggcgggttctaataggagcgtgtcatgtccctcaggtgtgttggagaggaaaaacaaggttgagaactatgaagtacttcctgataagtggcttgcaaggggcatttctgacatgtttgcagtgtgccctgacttgtgacccccttcccttcccaatctcatgaccactaaccatctgctcagcaaaccctctctcggtgggtggcacagaggctggcctcagtcagggccctgtccaaacatcgccagctcccagtgagcggggtgacccgatgaggctttgctgtcaccctatgtgcccagtggtggcccctatcctcgcccagccctcccctccgtgatagcctggacaacagtgcaagccaaactttatctcattttctctcccacagatggaggtagtgagtaccttcaagagaagcggttcagttcagggtgctgtgcgccggcggtcttcggtcctcagccagcttcatgacgtaaccaatctttctacccctactcacgcaattctctctgctgccaatcctaccagtgctgctgggagtgagtcttgacttcccttttctctcataaatggcatctctggggaagaataagcctccccagctcggccttctctcttttgcagtcttgcattccgctcaccgtggcttttctgttctttctttaccgccctgtccagtccttcccgcccagacggtgtctctcgaaagccatattcttttatgaaacgtattcaacccatggcacttccggacctcccgttctttgctttgtttggtttttcggtttgtgtttagtgctccttgtgccattggttctcttttcttgaacttgtctgcctttgccgatggttcttcatgaacttgggccgcttctgggggtgtctggtgtcaggctagggccttgctcagtgttcagtggtgcagcatcagggcagcacgcgggctcagggccgccttcccggggctggaggggtggcgggtgcctttcccacactgtttgccacagaagaatctagcccacgtacccaggaactggagcggcgcttccagcatcctccttgaagtggtttcctaaggatgccgctgtcacctgtccccaggtgggctcagtgctgaccaatcactactgcacaggtggtgcctgccctgtaggccttgccccaagccaccgggtgttagaggtttccccagaactggcactcagaggcctcttcaagacgttgccaggaaaatttcccaccatgttggtcacagtttaaagagaacccaggggctgtcctaaggaggtagaaacttccagaattgctcacatctttttacaaagacaaagggaaggccactccaccgctgaccccactaccctgatgggagagaatgcagggaacccagtgggcccagccaggcagcctgctttttccagcaaactcaagagagtttatacaccaaagagtaaactttcgcgcgtgggcccagggcctttgccaggatggttctatgctacctctttcctttccttctagcaagcccccgaagcgctcccctctgccaacacgaacacgccactcccctgcaggtgggagtccttaaccacgcctttttccatcacagactcttccagcttgattgcttttcttttcctttctttttttttttaggaactggtgagaggtccctggtgggggtcacccctcctcttgcataagctgtcattttgggccactctgtcctttaaggaagggaggaggcccatcctgtcccccttgggaacagagcacgtgcgcgcgtacacacacacacacacacacacacacacacacacactccttctccaaaccacaggccacgtacacctccagcttgctccacactcatcatggggccacctacccttgtcacaaatattggctgacaccgtggcagttgggctgaaaagcagtcggcgcctccagtgccctagacgtgggcccaaaggggcctcgccgccactccacccagagaggcggacaggaggctctgccaagtcagttaaagccagaaatggttcgtggcctcccagcaccttccttcctgggagctgagggcagcagggggcatggctgtgcctccgcctccctcccccttgacttcctccgtatgtctctttgccatctctctctgtgcttcctgtctgtctgtccatttgcccatttgttgagttaaggggaaggcagccaccacggccccactccacgcgttcctcgagccttctccacagctctggcctcatcccaccccaggaccagctccttgtccctctccaggtccagcccagcctctgtggggcctgctgtcttttctccctctggattcctcctgcttcctccctggggcagcctcttgctcctctcttccttggctcctagcacttccttcctgccttcattccgtggccatctgtccccctcctccccacctccggagcctggcagtgcrgggtaagtagagtgggagagacgccacccctcctgctgttcacaagctattccatgggggccctaagtggcggatagccagaaggagggcagctgtcccttgcacactgtgtgctccagcagaaggtgggtggcagggccctctgaagaggcccatcccagctgaacatcagcatcccagaaaggactctgccgtggaggaagatgctggctggggacctggcaacaccaaggacatgcccacttctggaagccacctgccagaaccacctcctgccatcatcacagtgcagcggattggtttagaactcagaacccaacccccactccacgcttcaaggaccccaagcaatcaccaagcccagcactctcatmctagagatcaggggaaggaggttgtccccaagggccaggacctgcactgggtcccataagcagccaggcctggcagagtggggactagcaccagcgcccaccctctacttggaactttctggtggatgagagatgctctgaaggctgtgacggagctcccctagacaagagggctgccccaactaggcctgcaggggcgtcgagtcacrtggtttcctaaggcaagcccacagtttcccatcctctttgcctgctccaggccaggctgcctttcagcccaccaggagtctggggcctttctgggcactggagctgcctccgtcccaagcctttcctactaaggacctcaggtcctccagagagaagggccggtggttggtagcatgacatcccctcaccctgtgcccctggggccaatgcaggaagtagcaagggggtggctaggaggggtcgagagatttgggatcgctggggctcagtgctcacacactcgagccctccccaccctgtctaacctcccacacctttgctgcttctggactcaggagtcccaacacaggccccatccctcctctgcatgcattgtcagactgtgccggccacaacttctgacccccagctccaggcagcctccactgcccctcccctgcccagcctggtgactaccccacaccatgccccaaccacacactcacacaccgaggccacagtatcaccctccctgttgggtgtccatattccggagagctggtcagggacagctggttcagtcactcgggtctaccaagggcagcaggcacagggggctgcgcgtctgccactaggaggcacgggagggtgcgcgatcatttggaaagccccatcaaagccacttgagaggccttttatgtctgttttccactgggacacacagacaaaccccagccacgcatccaaagtctatccttccagcagcgccacaccaggcctgtgtgagatgcttactgttggagtcgttcctgagatgcctcctgacctggcccagcaaaggagcaggggttaggcagcaggccatgagtctggtcccatgtggccaccgggggtccctccgggccgtttagttccagttaatcatgctggaaacagatcacagcagttgcttggttttattggctttggcaacatgaaaaccgtgtggccaaaggggccaaaccgggccacgtgagtcccaggctttccctggacactcctttccagggcccagggcgacatgctcaccacactcccagccccgtggtggaaggagtcttgttttctggagtttgctccattctcaggaaggtcatgtgctttgagccaagcctccctacctggtttctgggaacggtgtattggcattttttctcagatctttgacagtctgcaccctgcctccatgctggaagcagtagcaaccctcccccaagagccctgccctaggctttcctggaaccctgggccctaccacaggggaatgcccttccaggcaaaccctaaagtaggcaccagaacgcagcctagggcagaccccaggacccctggtccaaggccctccccatcaggcactccgagtgtggactcccaagctgggaacctgggcagagacctctcaagactaattggaggtcccgcagctggattcagccagtacggaggcaagggctcagctgggccttcctcctgggtcctctttagtccgaccacccgacactgactcgccgcgcccaggtcagttcagcttgctggtgttgggagcacaggtctaggctcacacggtcctgggcatgagtgtgcacacaaggtgggaggcaattttcatgaaacttgccagctgcaagcagttctggcttgccaacacacacasagccatgtcttgtcttttccgttctttggttcaattccttggggaaagagccagctgtggagyttgcattttcattkttcctaattcaagcatgtgacatccccatggggtagaaaggggccttccccttgctcttcccccacatagagaagtgaggccgaagccatcttctcctcagtgttcaggctatctgagcttggcttctcattgcccgagttgactgatggttcctattgccacaggctcttgaggacacctttgtctcgctttcaagttgtgattcaccttcacgcctacaggggttgttttgagcctggaaaccctaaagttcttgacaagaagttccccatgggtctccctggctgctgtgttcagaatctgctctaaattcaaagctcagatgcctggggagctgacaggtccctgcctccaaaggaaggttctggaccagtggttggtgctgagcagtggataggtagggaggaaatcgaccagaagcatccgagttctgtgaaccttagcggctgagactgagcagagagcatggagcccctcgggtcggctggtgcccagcacagaggcagcaggatagggcttgtttctgcttgaggaattagaaggaagagtgagaaggtgtcaggcacagcttctgtcgtttcgttgtcactgcggtcaggagtctttgctttgattgttctcttttcctttcctttttctactcttctcggtccttcgcttgtctccctgcttctgcggcccttctccaccctcatcctcctccccagccctgcactgcaaactccagcacttgaaggctaaccaggggcacgtctccccatgcacatggcgggcacctccactccagctggccggcagtggcatcgcacatggcactccacacctgcaccccttccgctttggctcagtgtggccagggatgggccttgtcagtctgcagcgtcacccgccctgtgtaaggctcagaactgctcatccacgcaagtcgggagcccgggccaagcccacagcactcagcatgtctcctctgggcagctggtaacaaactgcccgggacagcctctctaaggatgcgtacttgagctaagttcagaggaaggagaaaggccagccaggcagcagaaagggcaggggtcatggctccggggagcccctgcgtggggtgttcagaaacagctccagccggctgggcattgcaaagtgggcaaagagctatggggagggccgaagccagcacaggaggctggtgcaaagccgtgtgggccccagacattcagccccgtccactgagcccctgctgggtgcagcgagccagacagacagacccctgccccagggggattaccttccagtgaaaggtggatggatgtagggggcacttgaaggaaggagcagaagtgggcaccatgctgctggggaagacaagagtgaggggagccttcctggtgtggggtgcagccacagcaaaggtccccaggtgggatgtgccggaggctgaggggtaaaagagggcagagtgagaaagactggggccggctccgagggccacagccagtggagggcttgtagcgggggagaccaagacacgctctggttttcgggccgccgtgctaagggcatggaggggtgggggcgaagtgcaggttctggatggcgtttgaagggagccacggggctggggccgggggggttgggcctgctaagtttgagacccagcttagatgcccaagtctggagccggagccgagaggctgttagccgacaggtggaatggaaggccgagagccagaagagagtacctagacccagaggaggggccctcgggtgtcagggatgggagaggaggaggggctggagcagtgtcggacagcgctgggggactgtgaggagtaaaggactgtggcctctcagggccatcagccatgatggggaacggagaagtgtggcagagggagacagcaggaggacacaaggaggtggggacacacagtggggagccacctcgcctcacccggatgagatggggagtcctccagcccaacctgaccctcctaggggcatctctcccggaagagtgctttcatttcctttctttttaaattgtcacagtaaaacgggcttttgggggtacagttcaatgaatttccacacagtcaggacacgggccagttccatcgcctactggaaggtttagagccagatgggggaccaagagtctgacttggcagccagagagagctcggaaactccacctagagaagggacaggaaggatggagggctttgctggtgggggttggggtcccaatgtgaccccagggccccaggcaggacatagcagcagcaatggaggtgaggagaggctcagatgtggaagatgcttttgagttagggtagggcccacaggacacgtggatgtctggtacatagggtcagggggtcaaagtgcctctgaggtttggccagagccctgcactgggatgggaaggctgctggtgggcagagttcagctggagcactgataagagtcctcctcgggcctcctgcaatttgagaggtcccttaggcatccgagggggaacacccrggaggcagccagggcagaagtctggcagtccaggaaaaggtggacatggtgcagctggtatctgcagtatttacggtggcctgatggtctatagacagcattgacagccctgggggccatgagattcctttgggagcagtagggggcgtggcgcgtcctgggctgagagcagagcaggaggcggtgcaggagcctgagatgaggacagagtgaacccaggctggtggaaggagggcatccttgagcacccaggtaggagtgcagccctctgggatgggcctctcttagaaacgtttgttgctttccattgaaccaatctcccaggaatcgactgcatccttcagtgttgggtgggctgaaaacaccccaccttaacaccaacaccaaaacattgtttaatggcccaggattaggatgcagggaaaatagagcctggagaaagctgactcactgtcagctgtaacagactcaccaggactccagccaagcttagcacccccaaacagcagaatgttggggggcagcccttccatcctgcagcggttcactcagtcacttgtgcattccccaagtgtctgctgagcagctgctctgggccaggctctgttgttaagccacaaacaaggcagatgccatccgggaggggcacgctggagtagccggtgagaccggaggagcagtagcagcagaagcccagcctggaaggaagggctggctccgtggcctggctstcctttatggaggtctttggagttgagccaggtgcagtgagacctgtgcataggtttgagcaggggcctggcctgatcacatgcccccaggtctgaatgaggccaccagctcagcgagatctcaccccacacagccctggggtcaaggcctgcagcactttgtcctttttgtgacttgatgggcaacagctttagcaggcgatgtcccaggcggcttccacaccacaatcctgtaccagaaaaggcctaaataatgaggcaacatctgcattggctacgaaaactgaattctgtttcttttcattaaaaacgtcaaattattctcaatttctgtgttacccctaattcagaaaccagtctggggataaaggcctgagtgagaatagctgaccatctgccgtctggcagatgtggctttcccgaatgcagagaaaatccgaaccagatttcagatggggtgctagaaaattccaatgtggagctttttggcttacttttttttattattattttaaataggaacggggagtatcactctgttgcccaggttggtctcgaacacctgagctcaagcgatcagcccgcctyggcctcccaaagtgctggaattacagcygtggaccaccaaacctggccctggctcactttttgcactggagaggtgatgaggttggcatcatttcagctgattccgaagcactgtgctttgcctagctgagcccctggagggctgaaagaaagtcaccgaaaaaaggtgattaattgtctaaacgacagagccagagaggaaatatttttagctttccaggcctggtctctgctgccgtgacacaactgtgcccttacagcatgaaacttaaaccagtaaaattttattaaccaaaactagcagagagctggggttagcccctcagcaagccctgacaccttgtctaaacccagaaaaccaaatcctaggtcgaaccttggccccagaaatgcttcagaactcctaatgtgtccacctgctcacataggcaggggtggacaggtgttggatgaaccccagggtctgcctggcagctcagcgctccgtctgctgccccctatagggatggcagtacaaggtgggccagctaccattggcggctgtgctgacactggcctgtgcgaggccaggcagaggcctccccatcaactcctggcttctagaagcaggagggggcccaggctgaggggccagggagcaaagagaggcagcaaggacttgagtgcgtgaggcaaggtggagaagccagaggagggaagggctcgctcctggagcagtgccctgccggagggtcagggggcttmagggctgccgtgcgctcagctgggggcagagggccactgtgccgggggagtctggggcacagcgggagctctttcatgcgggaagttccgctgatctgaggtctgcaaactcctgtggggagggatggccagggaacaacacagagcggagcccgggaggcagcagagacgcaagttttggaatgtctgactggaagatggaggaggagacgggagagaggacaggcggagtgaggtcagaagagcagggacaccagattgaaccagacccagtcagacacgggggctgtgaggaggccacaggggcatctgagcagagacaggctttagtgggtgcaaatcaaaagtgtggccattttcggtctcagatacctccagctggggactgctgggctctctggcctggagctctgagtacaggcctgggccacagtttctggttatagccagatgggccccagcactgtggccagggtggagaggtatggacagagaggaggagggacagagccaggccagagctctggggcacccagggacagaagagagggcagtggaggagatggggccagggcagctggtgaggtggaagagggccaggcaggggcaatgtcaggaagccatgagaagcttccagaaagagggatgatcttctgtgttgagtgccctgagggatcaaatcagacgaagatgcagaagtggccagtggagttagccgcagggagaccctcgacatggcaggtcccggctccagccatgggagctgggggatggagggagacccatgcgagaaaggccggcagtgcccataggctgggaacttgctcataccagcaggtacttcggactttctggtaagatcgagaagacatcccactcaccagcattctctccttttcaaatcatctttcttttctaccaaattggaattcagattgggcagagaccccagaggtcaccaaagccactcgtctccccaggacagggaactgcggggtcacagccaagagcctagtgcagcactctcaagttccagaatacctgcccagctcagcctagagaaagacactgccatcttttcctgcatgcggatcggttgacgagaccaaggcccacacctgaaaactctttccaaaggcaggcagagccatcccattccgtagcagccctccaacaaatgggtggacatttctcatgccatgacccccagccattgacgtgggtggaatttaccagcaccagccggccactgactgtctccttccttccttcctaccttccttccacgtttcctttcctttcccttcctttcctccctccctgctcccacctcgcgccctgtccctccacctcccactccagatccgggtggtgaaagcgttccgtagctcgctctatgaaggcctggagaaaccagaatccaagacctccattcacaacttcatggccacgcccgagtttctgatcaatgactacacccacaacatcccgctcattgacgacacggacgtggacgagaacgaggagcgcctccgggcccccccgcccccgtcccccaaccagaacaacaacgccatagacagcggcatctacctgaccacgcatgtcaccaagtcagctacctcttcagtgttttcctccagtcccgggagcccgctccacagcgtggagacgtccctctaacaagaacttgtctcagcacatgcgcacacgcacactcggactcacacgaagtcacacgcacacatgcacgcacacacacatatggggacctgcacacctgcaaaacgagggaacaactaaggtggctgaagacctttctggcagggcatttgcaaggacccaaatccattcaacaagggtgcagcctgccacaggctcctcatccggactgaggaagacgaggacagggaggaggaaaaggaggaagaggaggacaaaaagggggaggagaaggttcttcgtccaaaggaggaaggagaagaagtagaaagtgcgaagagctgagttccccacctttttttctattgatgcttcttttttaacaaactacagttttaccgtgtgtttgccatttgagctgtgtggtgggcagggggctggtttgggtttatggggagcttttgttgcacccatgcaggggcaatcagatcagcatcttcatgcaaaaaaaaaaaaaaagttgagtgctctgcaggcctgtgaagggtgccacctgagggagccgcctgcaagcggccctgcagccacaaagcaacccgccctctgcaaaaactaggcacatccgcagtgcgcatgtgtgtgcgtgcatgcacatatgtgtatgtgtgtggatctgtacacacacacgtatatatggccagatgcgtatttcaataaggaactatttactggcatgatatttgcattcctcttatcaggcattttcatttggaaatttcattattgaatgtagcaaggttgtagttgttgtttttttttttttcagggaactagactgcaagaatatctttctggtcaacccatttttgtccctcatcaccccgcccccacctttcgctcctgccctctgcccggccctactgagattcccaaggagaaggccgagagggggcgctccaggtctggagcaggtataattggagcatttgcactgagacccctgccagagaggagaaaaccctttcaagggaaattttaatctaaaaggaaaaaaccaaaatattgatgagaaggagtcctccagttagtgaaaggggagtttcgttttcagctttctttggttcctactccaattccacatccttcatcctggccatgcccccaccttcaagagcatgaagcactcttggagttgtgggtcctgcccagagtccagagagcagcctcagctgagcacaggtccgagggggcgggggcagggccaagagttcaaaagaagccaatggagggagagggagcgtcagaagcccggaggagctggtggtgggagaatgacggcagggacgcagccacagttcagaccctgtcccctcagcacctggatggactcccactgtttgctttggcaaatgccgaggagtcctcggtagaccaccttgatgtctgctgtgacatcagaggtgccaccaccaaagcactcttcccaccctagtctttgtgtccagcggccaagcttaagccatgaagtcatggatttgtggctcagcaccaggtcccgaggggagcctatcctggcagtgtgggcacctggtggccaagcctcagtttcccccaaatgagcaaaggggataaagaggggcccgacttttgccaccctcctgaggaagcccctaggtccacacagtgatgccatgggggacccttgccttccacacttgcaggtgtcacgttttgcagggaggtgtttgggcctggggctcagccactgggagacagttgggacctgagggacagaggatcggaatggaaaccaccaacgtgcactggcaccctcagaaggcttgtctcacctccaccggcatccacacaaaaccaaacaggagcaggcgtcatccccactattcccatgaatgccatgtcacccctgagcagaagcagtcaaatcttgggcaaaagaatttcggttagaaaagaaaatcccactttaaaatgccagctgcagataactcaaagccatcccttttttctaaagggcacattgagaatgtcacccatttgtaaactgttccctgatgtccttgtttaaacgataataagaaaaagggcaactccatttgttgagggtctttgtgttcttcaatgagaaatcaaatttgagacgttgaaattggagctgcgtgctgctgcactcaccggcttcttctcactctctgtcgtagacacaccgataggaccaatggccaatagatattaaaagcaaaccctcactgctgctgtataaagttgcctaatgtaaatgtctattgtttagtccctaggtcacctttgtgctgtgctgtggagttcagaaacggggtaccatgacctggaatcttttgctcttgtttttgcagtcttcaaggctgggggccctgtctcattgggaagcccctctttataaagcattatattacttggaatggcttggtcaactgtgttcagttcataaatatgttttacatttttatctgcctgttataaagatgaacaaaaaaacttaatgagaaagatcacagatacgtaataatttaaagtctgtagttgaatttcctaacttaaagaatagaccaaaatttctgtgtataaaaaaaaatgaaaggctccttacatcctggtctgggtaacgtgtgtgatttattatttggtgaattcttgtgcagaacaaaacaaaggtgccttcatgccgctttaacagagctggagaagccccgggcaggaggggctttcccctgggtgtgcagcagcctggccggatgtgtatgcagaagaggaacttatgctgggatgttaggcccccagtgggaggggctccagctgctgcaggagccgcggctgtcttgacttgaaagggcctctagtacacggcgcggtggctcagtcctgtaatcccagcgctttgggaagccgaggcgggaggatcccttgggcccaggaatttgaggctccccgacacacatgcacgctccccacttcttttattgtggtagaacacagatcacataaaatgtaccacgttcaccatttgtaagtgtgcggcccaggggcagaagcacattcacggtgctgtgcagccatcaccaccgtccagccgcagaacttgttcatcttcccaaactgaagctctggccccgttcaaccccaactccccaccccccagcccctggcacccaatcttctactttctgtctctatggatttgaccactctaggcccctcatagaagtggaatcctacagtatttgcccttctgtgactagcatgatgtcctcaaggatcatccatgtggaagcatgtgtcagaatttcctttttaaggtgaatcatactccattgtctggatatgccacattttgcttatgcaatcagccatccatggacatttaggttgcttccacatttcagctattgtggaccatgctgcagtgaacatgggtatgcaaaccgcccttccagaccttgccttccattcctttgggcctatacccagcagtggaaatactggatcctatgggaactgtaggttgaaccttttgagaaagcgccattttccattctcatcagcagtgcaggagggttccaatcatagacgcctttgctaatcgaaagccacaggaagaaagcccaccatttcactcattcccttaatccacatgctgcatccctcaacacctgtgcctgtgcacgcccatgctccatggtcccatccctgcttgagcccagaagagccaggaaggcaatcctgtggccaagacttgccaatgaccaccctggcgatggcactaagaccacactcccctcatttcattggacttctcttccccttttcgacttggcagcaccggaagacgcattttccaggaaggctgccaagagaggagaaaaatggcttcaaagtcattcaaagcatcagagtccatgcttctaaaactggcaaaaagaccaatcaggccgggcacggtgggtcacacctgtaatcccagcactttgggaggccgaggtgggggatcacttgaggtcaggagttcgagaccagcctggccaaaatgatgaaaccctctactaaaaataaaaaaattagccgggcttggtggtgcatgcctgtaatcccagctacttgggaggctgaggcaggagaatcgcttgaacccaggaggcggaggttgcagtgagccgagatcgcgccactgcactccagcctgagtgacagagtaagattctgtcaggaaagaaaagaaaggaaggaaggaaggaaggaaggaaggaaggaaggaagggagggaagaggagaggagaggagagaagacaagagaagagaagaataagaggagaaggaaaagaaaagaaaaaagagaaaagagaagagaaaagacaaatcaaaaacagcaggcagaagaatcgcagcatgtccttgctgcattggtgtccaagtgcatcctgaaccataaggatgagtaagtccagattgagccaaagtccataccaagacagctggcccttcatggagagacatcatgctaccccaaaagaatcgcaaatttgtgtctgtgaatcccttgtccacaagcttctgcttcaaacatgacacaggttccacaggggaaaatcggaactcagtgaaacagctgagtcctgggagtaaaggcttgcgcaggggtctgggggaggcccgtgtgtgagtggcccgtggctgctcacaacagaaacttctctcccagttctgaaggccagaagtccaaaatcaaggcatgggcaggccatgctccctctgaaggctccagggcagaatctgctccaggacctcctcttagctttgggcattgccagccgtcctcggaattccttggcttgtagatgcttcactccaacctctgcctctgttgtcgtgtggtttttctcccatgtctgtctctccctgtgcgtgtgtctgtctgtgtctctcctcctctttttttcttatacctgaatcaagcagctttattctcacccacagcacagttccatgcacgtgggaggctctgttaggttccagaagaaatataggcacggaggctgtttctggcttgcaattctgtcacctcagagtcctttctttctggaagttcacatgagaaaatagatggtgtttacacctttgctcttaagtgcttacagtgacatctatagtgtcccctggacttccagagatgaacatgaagcacatgatcctatctagaattggcgggcactaattttccccaccacaatgattgcctgttatttcaagcaactactatgttccttattggttttacattttaacataccgggccaggcatggtggctcacgcctgtaatcccagcactttaggaggccaaggttagaggatcgcttgagtccaggagtttgagaccagcctgggcaacatagcaaggcttcatctctaccaaacataaaaataaaaaattagccaggcacggtggtgcacacctgtagtccaagctactcagaaggctgaggtgggaggatcgaatgagcccaggaggccaaggctgtggtgagccatgattgcaaaagagagaaaagaaaagagaaaagagaaaagaagtggggagggagggagggagggagggaaggagaaaagaagaaagggagggagggagggaaggaaggaaggggaaaagaaaaaagaaaagaaaaaggggtggatgaattagcccaagatacacgggtgatagaaccagccttcacagccaagtggtctaactccagaacccactcttcgtttcttggaatgttaaaatgtatttgaatgctaaaatgtgtcttgtcttgtctttcctgtgtcttgtcttttgtcttgtcttgtctttcctgtgtcttgtcttttgtcttgtcttgtcttgtctcgaactgctgagctcaagccatcctcctgcctcggcctcccaaagtgctgggaatacaggcataagccacagtgcctggcctaatttttttttttttaatagacaagaggtcttcatatgttgcccaagctggtcttgaactcttgggctcaaatgatcctcccacttccgcttcccaaagagctgggatgacaggcctgagccaccatcccctgcctatttttaaaatgtttgaggaatatccatactgttttccatagtggctatagtatatcccaccagtagtgtgtgaatgttcccttttctccacatcctcaccaaagcttgttttcttttgtttgatagtagccattctaattgaagtgaggtgatatcctcgatgtggttttgatttgcatttccctgattcctgacgttgagcaattttttcacatacctgttggcgacttgtacgtcttctttggagaaatgtctgtttaggtctattgcccatttttaaattaggttgttattctgttgtctaaattccttatatattctggatattaaccccttgtcagacgtagagtttgtgaatat

SEQ ID NO: 95886 - DNA, 123764 bp, Homo sapiens
  misc_feature (1)...(123764): n = A,T,C or G
ttgactcaaattgttttattcagggctttgaagtttcaaggaccagaaattcaattaaattagttcaagtaaaaggttttcttagaataatgacatgaaatttctcagaaataccaatcaaagttctcttgagccttgtatttgttgtgaatattttaggcttaaacatattattattatttttttctcacataagaagaaatctggaggcaaccagttgctggttatttttagtagagctcaacattataaagaycagtgacactgcatttcttggtctgtccctcataatcaaaagatggctgctgtagctctagatatcaggtccatgttcaaagaaggtagaaaggaagggaagggaattcagccttttcctttggtcaggaaagcaaaaacgttaaagaaacctgccagtagatatctgcttacattacatttacaagaactctatcacacagctgctaataaaggaagtgaaatgacaagccacatactcggagaaaaaatttaccacacaaagaattactatgaagagcatatgaataacttccacaattaaataagaataagatatacaatagaaaacaatagaaaaatgaaaaaaaaaaatagaaaacacaacagaaaaatggcaaaagacatgaacaggcagttaatagaagaggaaacatttttggtgaatacatttagggaaagacatccaaccacattagtgaccagggaaatgcaaattaaggctacattgagatacacatttatacctactaaattagcaaaagttaagaagtctcagaatattgcattgatgagaatgtggagtttcatccaccactagtgggggtgtggatgaaatggtataaccatttagtaaaacaatctgagattatctcatgaagttgaatgtggacatactacaaaatgcagctagtaattccacacaagagacatgtacacaaatgcctgcagcaagcattatttgcataaatgaaaaccccgatgactattgtcagaagaatgaacaaaatgatgtattcatatgacagacctactattgcagcagcatgaatgaatgtaagaaatataattgagtgaaaaaatatcaagggcagaagattaaatctatggcataatatttttaaaagctaaaaaacaagcaagtgaaacaatatatatttttagagatacatatgcacgtggttaaacgatatggaaaaaacaaagctagggaaaggtaaatatagaattcaggtgctttcaaagattctgcaatgatccaggtgttcagttgaatagaattgtagattcatagttgcccattttattatgcctcataacttattattatttatttgtttttttgagacggagtctcgctctgtcacccagtctggagtgcagtggcaggatcttggctcattgcaacctctgcctcctcggttcaagcgattctcctgcctcagcctccccagtaactgggactacaggtatgtgccaccatgcccaggtaatttttttgtatttttagtagagacggggtttcaccaggttgctcaggctgctctcgaactcctgacctcaaatgatctgcctgcctcggcctcccacagtgctgggattacaggcgtgagccaccacgcctggcctttcataacttatttatatgttatatatttatgtatcaaacattacatgattaaaatttttattttatttttatttttatttatttattttttgagatggagtctcgctttgtcgcccaggctggagtgcagtggcaccacctcggctcactgcaacctccgtctcccgagttcaagtgattctcctgcctcagcttcccaagtagctgggattacaggcgygtgccaccacatccgctaatttttgtatttttggtagagatggggtttcaccatcttggcccgcctcggcctcccaaagtattgggattacaggcgttgagccaccgtggtcggccgattaaaaactttaataaggtatgaagcaaatggctttgacaaaaagtgtaaaaaggattaaaatacaccatcctgtgaaattttctttttggagcacatgtactggggaaccagacatcgacatttttagttattttagtttcacagtgctatttgagtataatagaaactgtatttgcttcagtcaatttggggagaaagaacataaacacatggaaacacaaatatcctaagggaattgagtcttattactttgcagacaatttttgaaataaataagttgctgagacagtaagtgctgttagaatggagagagggagacttaccaataatattatgttaaagagcagtgcaagtagaggagtggggacagaattgagcatgcagaggtatcgaaagagaaagtggaaatgcagcatgtaaattgcagattccttttcaagaagtttagtaatgacagaagagaggaaattagcttctttcttcttcagggagcttcaggactgttcttcggaagcccaccctactttgcttttgtttgatgcctgtattacagggagaaaagtttggcccaaggacaaactttgttaagcatttatgcaagcctctgaggtttctttctttatttttttaaagtatttttttctgggatgcacaaactccagagaaatggagtcagtgctctcgcttctgaggtttcatgttcagtccagggacacactcatagctgcccccctcccccgggggtattaatggtgttaccatttaattcgtgtttcctttttaaattattttcatcaccatttcaaagttatttaactcattctcaattccaatgatcacaccagaattcaattatgacaacaaaccaaaacagtcaaacaaaaaaattcccccaaaaaggaatgaaagctccccattccaaaacaaaatgatgtgtcatagtcattctttccacaaataagggcttattaattgtttttttttttttttttgagacagagtctccctctgtcacccaggctggaatgcagtggtgcgatcttggctcactgcaacctccgcctcctgggttccagcgattctcctgcctcagcctcccgagtagctgggattacaggtgcctgccaccatgcctggctaacttttttgtatttttcttttttttttttgagatggagtttcactcttgttgcccaggctggagtgcaatggcgcaatcttggcttaccgcaacctctgcctcccgggttcaagtgattttcctgcctcagcctctcaaatagctgggattacagtcatgtgccaccaggcctggctaatctttgcatttttattagagacagggtttctcttgttggtcaggctggtctcgaactcccacctcaggtgatctgcctgcctcggcctcccaaaatgctgggattacaggcgcgagccacagcgcccagcctactttttggtatttttcatagagacagggtttcatcatgttggccaggctggtttcaaactcctgacctcaagtgatccgaccgcctcagcctcccaaatattgctaggattacaggagtgagccaccgtgcctggccttattaattgcttataatctgcacatggcacaagtcccatttaaaataacaggaaatgacaatgcattttaatgggctttggtttattaatctattttatttatttatttatttatttatttatttatttatttatttgagacagagtctagctctgttgccaggctggctagagtgcagtggcatgatcccggctcactgcaacctccgcttcctggattccagcgattctcttgcctcagcctccatgtagctgggactacaggcacgtgccaccatgcccagctaagttttgtatttttagtagagacggagtttcaccatgttggccaggatggtctcgatctcttgacctcgtaatccacccgcctcggcctccaaaagtgctgggattacaggcgtgagccaccgtgcccagccctaatcacatgctttctaagtgggcctcaggattccccttgtgggcagagaacttctcttgtttattttagcttcttcacagatgtgtaccaggtatccattaggggctcaataaatgttgaattaatgaatgtgtgaataaacaaaaaatcactaatcagtaaggtttttttgaatgcttatttttgaaaacgcactttaagagtaaattttttttttaaatagaaagaataagatctagtacttgatagtacaacagggtcactatagttaataattaaattgtacattttaaaataactaaaagagtataattgaattgtttgtaatacaaaggataaatgcttgagaggatggatacctcattttccatgatgtaattattacacattgcatacgtgtatcaaaacatctcattaccccaaaatatatacacctattatgtacccacaaaaagtaaaaataaaaaatttttaaaaagtaaatgtttttaaaaattacttttaaaaagtaaatatttcaaaagctgtttaagacactgagactagactgtaacacaataggtgctcaacaaatgttttttgaataaatacctaatactcagacatcacaagtactttgaatttattgtgaccttgcaatctgaggcccttgtaactctggaagtaaagaaagctacatgataaacaatggcacatctttctcaggtgtaaattgcttaaagcttttacggctatttaaacaagaggcaaaataaaacattagcattcgttttaaagaaaaacatctttcttcaaatgtatattttgtttttgagagcttacttggggctgtatctccagactctgtttaatgttatctttccattggctttatgagtgctttgcaggataagtcgaagaagtagtaggcacattttgtgatttgtgttttacatatttaaagagaaaatataccaatcattaacatctgtagacggtttaactctagataaagccactatcatataatcttttctgggtttyacttcttcctccagactggaacactgggcagcttaaagctgtaaaagctttaagcaatttacacctgagaaagatgggccattgtttatcatgtggctttctttacttccagagttacaagggcctcagattgcaaggtcacaataaattcaaagtacttgtgatgtctgagtattaggtatttatttaaaaaatccccattttacatattaggaaactgagattactaaatgtgggctagggtcctcctgggtatggggcagggggagtgcttgctgctgttaaagaaaattatcctgacacttgtcaaacacatgaataatttattcaagattattacaataagggtcatgactattggaacaggagagagaaattgagctcaactcagaatacagcaaagacagcaggggatttatagccaaggaacaggcaccgtgtctgtgagggaggtgacggtggatggaaaattactaagaggagacatcaagggtagagggattctggctaaaggcaggtcaagggcttctacaacaaaggtgtaatataaggaatctaatccgatattaaatatcaagaattcaacggtgatcaggtatcgaggatggatgatttagcatgcttcttgctaacatttgggctcagccaggacacagggaggtcaacgttgaggcctaagtgagaaagggctcagaggtaccaaactaaaggagagcgtctctgttcctgcctactctgacctcttttccccccttaaactcagtggtaacaatctgacctgtttattacctcatccccatggaaggggtggggagtggcaggcagccggtgctctaggatcgttgggtagggagcctagctctctgaaagcagcaatgcctagtgggggtaccgaggccgagttcggagaccacctgagcaattgcggtccagagcaaagccccctggatcggaacgggagccgcccccacgccccgcccggctgccgagagccgcacttctgggcggatgccgcaggtcgggagggatgaggccgacggcgctgattggctgaccgccgcggcctggggtttccctggccccgcccctgctgcactccccccgcccgcgaacccgcgcgctgcccggtcctgcgctgcycagcgggaggggctggaccccgcgttcctcctccctgccggtccccatccttaaagcgagagtctggacgccccgcctgtgggagagagcgccgggatccggacggggagcaaccggggcaggccgtgccggctgaggaggtcctgaggctacagagctgccgcggctggcacacgagcgcctcggcactaaccgagtgttcgcgggggctgtgaggggagggccccgggcgccattgctggcggtgggagcgccgcccggtctcagcccgccctcggctgctctcctcctccggctgggaggggccgtagctcggggccgtcgccagccccggcccgggctcgakaatcaagggcctcggccgycgtcccgcasctcagtccatcgcccttgccgggcagcccgggcagagaccatgtttgacaagacgcggctgccgtacgtggccctcgatgtgctctgcgtgttgctgggtacgtacgcgccgccgggyccgaggggcgtgtgcggctgtcccgggagggctttagcgcagagccgcgacgggcagcgggggtgtgttgcctgacgcgtgcgcmgctgtggggcgacacacgggggcggcttctgcagccgagggaccccgctttgcagcctgcaccccggctcccgcgtgcccgccgctgtctgtcgcccgccggtgcgmtgagcccagccctgcttggacgctgttcacgcctctgcgctccatrccttgctcctgtcctctgtttgcagttccactctagcagagcagggtgggctcctcccctctgtacggtagaggagcctggtcactggcccatctcagtagtgaaactggaggtttgatgcacaggggattctcagtagcaggcgccagtgcctgatttatcgtgagaagcagtttaatatttcggctataaaaggctagaactagttcctaattagaaggtgtgccaggttgtaaattgtcaggttgcaagtagggatgagcacgccaagtttttgcgtataggtctaaagaagttttgggggtgggggaggatgcggtaccccagacctgtttccttgtctgcccagaccttgccatggtgtagctttccatctcttgtgacagtgtctcaaggagcagtagacattctttggctgcagcagatttcgcattgtcttcctgattggaagagttcagttatgaggcttctggttgccagttactcctttcttttgaagagaaagaactggaatcatttggataagggatgggcgttggaaggagtagttttcactttttatgtattgtataaggcagttatgctgtgaactatttatatatgatggaataaacaaaaacaaagcaagagctgctggaggtttggatagtcctactcatgttgaagtaatcagaatagtagtagtattggcaagttctcagggtgggagatctgtggctttagccacctggatggaagtctgcataatggtttctcagtgacaggagattccctcggttttaatccagtagttcctagttattccactctccagtttccaaccgggtcatttaggcccttgcaatcttgtggaattcttataaattctgttaccaggttttgttgttgttgtaaggaaaaattccattttgttatcttttttttttttttttggatacagtctctctctgtcacccaggctggagtgcagtggcgggatctcggctcactgcagcctctgccgcctgggtccaagtgattatcctgtcttggcctctctagtagctgggattacaggcaccgccaccatgcctggctaatttttctgtttttagtagagacagggtttctccatgttggccaggctggtctcgaactcctgacctcaggtgatccgcctgtctcagcctcccaaagtgttgggattacaggtgtgagccacagcgctgggccctaaaactgcattttgttacctgttaatatgaagcatctttgttgtttcccaagacacttcctgtttaggtccacagtgagttttaggaattaagtttaggaaagtggaacacaattttggcacattgtctttttttttttttttttggagacggtcttgctctgtcgcccaggctggagtgcagtggcgcgatcttggctcactgcaacctccgcttcccgggttcaagcagttctctgcctcagcctcctgagtagctgggattacaagcacataccaccatgcccggctaactttcgtatttttagtagagacggggtttcaccgtcttggccaggctggccttgaactcttgaccttgtgatccacccgccttggcctcccaaagtgctgggattacaggcgtcaaccaccgcgcccaactgaacactgtctttataaaaacacagtcctttcagatgtcgggacttattaataattaaatatattcaaatttatttgcaacaaaaaattacctttcatagaaatgttacattaaaaaatatattttaacttatacttgatgtcattggaactttgttaaactttgtttatattttagtgaaaggagaggaaaatgttcgatcagaaaaaaatatatttctaatayattgaatattatcctatcattgccacatattgtgcactatcagaattacatatcatctttgtcttttcctactgtgggagttcgatcaatttgtaaaacaacataaatttttttctatgggccaaacagtgattagaatggctgaaacataatactgctctgaggtagctgaagctaatggtattaaacacaaagccatatggtagatctgcaattaaaaaaaaaatcacatataatggaggaactgacatgcagtacaattttataaattatgggttgttgtagcctgtagttttaacatgatacaaacatcacataattatcctataaaggttaatttcattgctacattgacctgacagttgcaggagtacaatagctgtcaataagataaaattgtgtttttggtggttttggagaaagctttgaggacttgttttaggaaaaggcatttaatctatttacaacattatgttttggtattactggcatttcttttaaagtaattcagcatattatcactataagctcagaattcccttttcctaaatagaaagtgacctattttactgacttttaaaaatgtaagattacattacatttaacaacatcaactgtccattgcaaacagcagtgaaggagaccagtggtgcaggagatacaaaacttttcacgcttacttttggaagacacgtgttatatagcaaatgcgcctttctggtggagtctgttatattaaatttgatttgtattcattttactgacagcaggagattggtagcctaaaatcatggtagcttcaagagagttttcaacctggcataaatttcctttttctgtgaggaatccacaggtaagaattgactgttagaacaaaaagatgattaagcacttcataagtgcagggttttgtgaaagtggttcataattataatgtggatacattccagattctgttaatgaccacctcaacatcatacagtatagccattttaatatgatgatgttacgtcaacctgttgtacaactactttataattttactgtgggtgatgtgtgttgaagtgatcattaaacatgcctgtgtgcatgtgtgtgtatatgtttctgtccgtatgtcatctttatcatcagtgtgaaacacgacttcctctatatacacgtttgaattattagttccttaagtggatctgataaatccttggaaaaagaaggagaattttgagaagtcctgtgtgttagttcctcaagtggatatggtaaattcttggaaaaagaatgagaattttgagagataatgtatatttgattcctttctgaaatggaacatagtcttgccatctgtctttggctctttttatgactggttcygtgactatagaacaggccatatacattatctgagcgcatgagaaaagctctacagagaatggtggtaggctggtatgaaaggcgcgatgttgttgtagggcatcgagccccgggccgtcaccgtcacctcggccgctgccgctgtcaccatgtcaccatcggggccgctgccgctgtcaccatcgccttgttcccccatcccccgccatggctgaggacctctccgcggccacatcctactgccccgtctgtcaggaggtgctcaaaacgcccgtgcggaccgcgccctgtcagcacgttttctgtagaaaatgtttcctgactgcaatgagggaaagcggagcacattgtcccctgtgtcgtggaaatgtgactagaagagagagcatgccctgaacgggccttagaccttgaaaatataatgaggaagttttctggtagctgcagatgctgtgcaaaacagattaaattctatckcatgagacttcattgcaaatcttstaagaagtatcaggatgaatatgatgtttcttctatcattccaaactttcagatctctgaagattcagtagggaacagcaataggagtgaaacatccacatctgataacacagaaacttaccaagagaatacaagttcttctggtcatcctacttataagtgtcccctgtgtcaagaatcaaattttaccagagagcgtttactggatcactctaacagtaatcacttatttcagatagttcctgtgacatgtcctatttgtgtrtctcttccttggggagatcctagccagattaccagaaatttcgttagtcatctaaatcagagacatcartttgattatggagaatttgtgaatcttcagctagatgaagaaacycaatrycaaactgctgttgaagaatcatttcaagtaaacatctgaaggctgtagacatctctgcatctttgtacctgcaagtgccatctttaagggggaaactacatgaagtcaccgtttcagtaacttgatgtgtatattaataaaagtaattcagtcattttagtttttgattgaaaataaaggtagggcttctaaaaacttcatcctcttggtaagttaaaaaatgaaagttatgacattagctttaaaagcgtaaaagatgtttcactaatgtaatggtgaaagagaatccctgttgtactttatctttttgtaatattaaatattcttgaatttttcattatgttgcttttgaaatttggtacattcctcccatttactttattattgtacacattaaacacacagtagcaaattttgaacgatgtgadataatctaacaaatctgagccagttattagagttgcagaatagaaacttgaagtgctaaatggaaaaatccaaaggaaattttttaaatgcagattctagctgaaaaattcaactataagaaaatcgtatttatataacatttactatttttgaagactagtaataattttaattctttaaaaagtgaaagcttgttgtaaagatattttctttttgttattagaaggaaatacagagagaaaaatttatttctttcatgggcatttggtaatttcagtctttgactgatttgtaagcctagaatatactaagctgaatagcagctctttggcctcagaattttcagtagccagtatttctgattaactaagttgaaactcttattagaaactttcagttggtattactgtattctagaagatrtaaatgagaggtttggcttcatctcagtttagaaatttattcaaagctaaagatgtatatgtatatatatatacttttgtgtgtatatatacacgtatgtgtgtatgcagtttttcaggttatatatagagtttctataaggattttttaaatggacaagcaatagggggttgaagtgtttatctgatttgttaaaattttgtgtataaccagatttttaaaaagtgatagtcacagtgctaagtgatctagttggctgctattacaccttagaaattgagtttacacacacacacaattacctgtttgtatggtgctcatttcttattctcagatataatgtgtgaccgtgatacagtgagaaagattctaccaaccactgtttcactactttttagtcaaaattgggtatgttcttagtattcattagtgagaatcataaagtattttgtagaaggcccaaatcacagaataaaggactaagagtggattcactgacattccatactaatatacattgtttatgctttctttaaaataactaaaagaacataaaagagaatctcagtagtttgctgctaatatatacatatattgtataaaaaggtatattttggttttgttctacactgaacattttttaaacttggtttaataaaaatgttaattttggaaaaggcgcgatgttttagcccagtgtattaaaccatatcctgaatacaacttattagtgtttaattgctaagggtcatttcagattttagccactatggcattaggctgccgattaatggacactgagtccattaatttattcaatgcatattgatggaaggctagcttcgtggccagtaccatgttaggtactagggatacaaagatgaataagataatccctgccctgaagggctcagagtctaatgatgaagaaataaacaagtggttataatacatcatgataagtacgataatggaggtttggaatatgttccctttgagcaaagacgagagccttgtcttagatctgctccattgtagataaatgatttgtctgtttactcttagagacgcagaaaggtcagaagttacctggaattactcgtagctgctgctgcttttttttttcttttccaacttgatatagggcagtaggaacccaagtaagtaccaatgtttatgacttayttgcgggcagtcccacaatatctagaagatttagctggaactgacaaaactttgattccttatacctgtgttttgctgtttttgacaatcatttagaatatctttctgtgctgtgtgtgttccatttgcccttccagatcttttctccactctgctctgtgcttctgggaaatgaattacatggggtacatcaactgagcccttcctttttggtttcagattagctttgcccagtgggagggacatcagaaaggatctccctaaaagctagttccctcttgctggatttagtgttgccaaagctgttctgtgagtagttcacaacttgtattcaataatggccctctctgccagccatctatagttacacatctttctgggttctaataacccttccctagcccctttagacctggagatgataatggcttcctgacgttgctaacctggagttataccaccatcttttgctgttttccctaaaccctgcctgtaccttttgaaatggttccttcattaagttttcttgaatacttcatttgagtatgctgcttttcttggcaggaccctactgataatacccatctatgtctaaaacagatttgaggtagcttccrtttctgcattaaacaccaattacagtgtccttaatggcaaatgcaaacaggagcccatgggctgccatcttggctttcttgggagggagggggttatggttccctcagcatgctccaaatgtggtatcatcattatgccaaatcaaagtcaatgggtatagagtaaaatctggctgcaaaaacatttgcaaccaatgctagatggttgtggggtccctgttgcttgttttaacccagtaattatctcaaatactgatgccatttcttattaccataatgctgacatcattttaccccttaaggatactcctaaggagcggtccctttgttaagcctcaatctgggtcccttcctcaaagggggaaaaaacaagtattttgggaagattctcacttgctaaatagtttccagcattttgtgccttcccttttctcgtaacatttatttgttcattcactcatattcagtacacatttgttaactgtatcataggtgctgggcagtgtgttagacactgaagataaaaataagtaaacaaataggacacggtgcctatcctgaccacttgctgtttcttctatttaactttttttttttttttttttttttgagatggaatctcgctctgtcgcccaggctggagtacagtggcccgatcttggctcactgcaagctccgcctcccaggttcaygccattctcctgcctcagcctcccaagtagctgggactacatatgtgcgccaccacgcccagctaattttttgtatttttagtagagacagggtttcaccgtgttagccaggatggtctcgatctcctgacctcgtgatccgcccacctcggcctcccaaagtgctgggattacaggcgtgagccaccgtgcctggcctcttctatttaacttctattaggaaacttattttgcttctgatgaaagtttacttgtttttctgtttgttgttgttgttgttgtttttctctattctagtcacagagagagggaaggaatctcaaaaaacgaacaaaaatttgtcaaactggcrtattcttgggtcagtctagaatcctattgcaaggctttttctttctttaaatgggtagtttggaacaaaagcagaggcttggaggaaattgctgctatttggctctagttggttttattcagctgagttttagcttaaatttaccttacttggaataaaatatagaaatgttcagaaaacgttccccttatagattttatgaaatgtaaattcttcctttatattctctttgaattacatcctttggaaactcaagaatgtgctatggatctttgttaatctctttctcatttagtcatttttggctgagctctaccaaactttccaatgtgttactcagtttggggaattattctgattcttttggttaaraaatttaaggttaaaattgtcaatgtttgcctatttttttttttaaaaaaagaagttggcagcaaaagtcactaaactcccagattttgagtgaactgattaacatgtaatttcagtttttatggaaagaaatttggaatgttgtctacttcctcctaatttaggtgccttaattcaacatttgaaatggaaacatacagtctgtacaatcagctaattaaggattatagagatactgtcttgtctcttcttttcaaaaaaaaaagcatttgccatccagagattatgaatagtggttacaggtagcattctcatctttctatccttctttctccttttaccttctttttcattgtcattccttcctccccactgtacttcccttccttctgctcatcttcccttcagtcttcttgctgtttaggtttaatgtgcaaatggtttaggtaggttgcctttttactcaactgaaactagtctaaaattgggggccaggcatggtggctcatgcctgtaatcccagcactttgggggactgaggtgggaggatctcttgagccccagagttcaagaccagcctgggcaacatcgtgagaccccatttctatttttttaaacaaacaaaaattataaaattgggaatgacttgttccttataagctatgaaaaactagtctatgtattttctttaaaatgttaggcagcatagtctagtgatggactgtggattcaaattttagctcctccattgaactctgtgaccttgggaaagttttctctttgtgcctgtattctttagctatataatgaaagtacctatggttatcttaaatgagacttaagtgaatcaatatgtaaagtgccttgcacttaatatgcatgatgtatgtttgtcaagtaaaataattctctaatcctactacctgtaacataataattatattagtagaaataacatyaactagttttgtattaggracaaaaacamaaactttaaaatgtttctcatgagtactcatggaatgcttttgaaacttagtgttttattagtcatgtgtgaaagccacatacatgatttctaagtagtggtaattccagccatggtgaaaattgatctgtgtaggtctgtggtggagagtaattaaacgaatggaaaaactgttattttatacagtgataagtcctgaatttcagcttactccagaaagtggagttagctacactctagtcacctttttattgctgaggtcttgggaatgattactccacttataaaaaagtagagttaatattcctaaaacttttttttgkggggggacgtagtttcactcttgtcgcccaggctggaatgcaacggcatgatcttggctcactgcaacctctgccttctaggtacaagcgattctcctgcctcaacctcctgagtagctgggattacaggtgcccaccaccacgtcgggctaatttttgtatttttagtagagatggggtttcaccatgttggccaggctagtctgaaactcctgacctcaggtgatccacccgtcttggctcccaaagtgctgggattacaggtgtgagccactgcacctggcccaatattcccaaaacttttgaatgaccttaattatacatcctcatttgtataaattctgttatttgaattgctcttggcgattaaacaggcagcaaggaaaaaccgttgtgtaatacttctctatatcctccctctccctaaaccaagcttgtccgacccatggcccacaggctgcatgcaacccaggatggctttgaatatggtccaacacaaatttgtaaactttcttaaaacattataagatttttttgcaatttttttttaagctcattggctattgttagtgttagtgtgttttatgtgtgccccaagacaattcttctagtgtactccagggaagccaaaagattggacactgctgcatctaaactctttttcaaacattgtgacatatgttaaactcaaattgtttttaaaattgtgtgagcacaatgttgttttaaagtatttgacattgcatcattttttatttatttattaagcasacattatttgctgtaatacaatgctaggagctgcaaataccagtgcaaaaaagatcagctctccataccagtgtatataagacaattacagatgtttgtaaaagctatgacagaattaaagcaagattataagaaagttagacttttggggatagcagtctcaatgaaggctctctaaagggggaatatttgaattgagaggtattggacttgagatttaaggaacaaaatgagttggccgtggaggagctgggggaaaattccaagcatagggaggagcaggtgttgagggcaaaagaagaaaagggcattttgtcacagaaaagaggccagtgtggctggaatatggtatgtatcaatggtatttttaatagtgaattttgtaacttttatttctaaatgccagaatggataaaaataataattgacatttatttagtgctctctaggcttggtacagccagtgcagtctctcgacaactctcttaggagcttggtcatctgcattctgtagatgacggaagtgagggctgggraagttgggaaactcacccaaggcaacctggctaacaatggtatagtcaggaattgggaagtgcatttttgaggattataacttttgaatgcagattaactagtgtgtatttgggaaaggttgtaataaatggagagggtgaagtggggatggttgatgagtacaaaaaataggtagaatgaataagatctagtatttgatagtacagcagtgattatagtcaataataatttaattgtacatttaaaaataacgaaaacagtataattggattgttcgtaacacaaagaataaatggttgaggtgacagataccccatttaccctgatgtaatgattataaattatatacctctatcaagatatcccatgtgccccatatgtatgtatatttactatgtacccacaaaaattaaaagtaaaaaaaatatggagagggtgagaaaggcaagaatgtgggaattcattgtctataaaaacaatcattattgggcctggcgtggtgggtcatgcctataatcccagcactttgggaggccaacgtgggtggatcacgaggtcaggagatcaagaccatcctggttaacacgctgaaaccccgtctgtactaaaaatacaaaaaattagctgggcgtggtggcgggcgcctgtagtcccagctactcaggaggctgaggcaggagaatggcgtgaacccaggaggtggagcttgcagtgagccgagattgcgccactccaaactggatgacagagtgagactccgtctcaaaaacaaaacaaaacaaaacaaaacaaaacaaaacaaaacaaaatgattattttagatggcttaaatattttgtaactattttagttttatgtttaactagttatgatgtagtttcagagtcagtttctgcttaccattttgagtatatctgctgtctaaaagaggcactttaaagttgggagcagtggcttatacctgtaatcccagcacattgggaggctgaggcaggaggattgcttgaggtcagaagttgcaggttgcagtgagctgtgattgtgccactgcacttccagcctgggcaacagagygagactctgtatctataaaaacaaacaaaaagaagaggcactttaatatttcatatctcagactcccaataactattaagcattagcaatgaggttatatcatactggaggatgtaactaatttcccctattcagtaacatgctcacagactttttcttcaaatagcgttgttataggcattcctttcaggttttcacaggaaaggaagatctttgtctctccctgtgttttagatgaatcgtgtatggagttcagagtgacctttggtaatgcattctagcagatatagttagaacctcgtgatttagtcctcagttgtcactgcttggaaatgtttcctgagtctttttcagggtggggtgtccaggaaaatgacatataggaaacgtgtagcagatgagcccttcagttaattggcagcttgtcacggcagattctgccttgccttttggttcatttgcatcagtagtaggagagatgggtttgctgcttggtgctggagaggtaaatgagtagagaagaaagctattatctattgaatgcctagtatatgcgtttggtaaatgtttcacatgaactcatgtaatcatcacaaaactctgaggtacatagtattagcctcattttatgccctacctaccactggagataccaaaaataggtatgcatttttcgatcaagggaaaaatataacccatggatttttactagcttattacttatggtagaagacagactcataggaaaaatgataaaactgtataatgttattgagtgcctgttagcactgagattactaagaatgagtgagacaaggtctccatcctcaaaaggtacacagagctttggaaggtgagataggcaggtattttaatcaagttttttgttttttgttttttgtttttttttgagacagagtctcgctctgttgcccaggctgagtgcagtagcatgatcacagctcactgcagccttgacctcccagactcaagtgattttcccacctcagcctccacgagtggcaaggactgcaggtgtgcaccaccatgcctggccaattttttttttttttttgagacagagtcttgctctgtcacccaggctggtgtgcagtggcgcaatctcggctcactgcagctctgccacctggattccagcgatcttcctgcctcagcctcccgagtagctgggattacaggtatgtgccaccacgcctggctaatttttgtatttttagtagagacagagtttcaccatgttggccagactggtctcgaactcctgacctcaagtgatttgcccacctcagcctcccagaatgctgagattacaggcatgagccaccgcccccagctccggctaatttttgatttttcggtagagatgaggtctcactctgttgcccaggttggtctggaactcctggactcaagtgatcctactgcgtcagcctcctaaagtgctgggattacaggtgtgagccattgtactgggccagaagtctgtctttatttcagaacaatttcccctgaaaccattgctgttgctgtacagcagagataatgtaaacttttgggcacattacttttggctactgctgaattctgaaataattcctgtagatagttcagaaggatatgagtctatccacattaataggtgaaaacactctaatattggtgcttaggaagtgtatcgccattcaaatacttgttatatgaatgactgggcaataaacttgagtcagccattcttccagggtttaaagtctagctccatctattactattgtgtgacattgggcaggtcacctcaactctttgagttcgtcatctaatgaggaaagagatgatgctaatagtgcctttctcatagtgctgtgaaattagatgagataatgcatgagacaatgtatgtgaagtggttaacatagtcctggcctgcagtaggcactcaaatatttttgctgtttttgttattattaagctaataagccaatttggtaccactgacacagtctgctatttaaatgtgatttcatgtgttggtgactttttgtttgtttgtttaatttgtcctagctgcagtttaaacagcattgaagtcagaacctggtttgtatttcagttcctggtgcccagatcatgatgggaaatgttttgattacttctaacctatttctttctggaatcagatacctcagatcttttgattgtacttctaggtgaacagtattcccacagctcatagacaaggtacctaaatgaagttcttggttggagagagaacagcaaactagaaatatgaataaataaagatgtgtgtgaggtgagaatggcatggtttggatagtaataacttctcttagtcctcagctcctaaaacatgaagattttatttcttgaatataaacttgtcaagagctaacttaaagtacaggttgaatgagttaaacattgccacttctcatcataacttcttttgatgaataatttattctttattttttctgtagagtttaagaaatagatgtatgtaatgattacagtcatttatagtattctgaggttgtcctaattttaggtaactgtcttcagaaaggtaacttgttaaatagatgactaaatgtaattaaaattcatacttttatacttttttctttttctttttttttttttgagacagaattttgctyttgtccaggctggagtgcaatggcgcgatcttggctcactgcaaccgccagctccctggttcaagtgattctcttgcctcggcctcctgagtagctgggattacaggtgctcaccaccatgcccagctaattttttggatttttagtagggatggggtttcaccatgtgggccagggtggtcttgaactcctgacctcaggtgatccacccaccttggcctcccaaagtgctgggattacaggtgtgagccaccatgcctggccacttttttcttaaaatttttaaaaaacacacttttgagagaatatttgatctagaaagtatcactagcatagttatgcagtgtagcagaggcaagtgacattttttgtattttactatttttcaaagggcatggataagagaaaggagttttaaatgtgctccttttcaactgttgtctctgcctagcccagtagccacttggagaaaaggtttcttaaattgtgatgttatcaaaacttgttaggcaggttatggataatgttcaactttatggctagtgtggatatctatattaaaatttactttatgtcccacagtatgaatgcagttctcagtgttgccattgaatataattattaaccaaatctgaaaaccagtaattaccctctgaagtttttttatggatttcccccctttcctcaggatttgacattgtaaatgattttttagtgagtggcaattagtttgaaccctttatttaaagagttcaaagtgtaatctagtagtaaaaacagttggtttggaagtcagattctggtcttgcctctgctattctctgtgatctcatggacaagatcccatggctgcttcatttactgattgtaaattataatgagaatgatgtattccttgtttatctctcaggatcatagtggtaaatgaacctcagttattaaggagagtcatcttgcagcagttgacaccaatggattcaggtagtaagacaaggagcacatggtatataaggggctattttgagcaactgcagtggacttgtgggagatcaattataaacttagcctggctaagaatggggtgagtgttactgtcagcataaaataggaaaaagttgaagactgaagtatttagaaagtagtaatataggaaaatgatccctgacacaaagtagtgtaggcctcctgcctggctttggttacatatgtttcttctggtaaaagaggaggcaaagatgagagtaggaaaaggaaaattaaaaaatgaaaaaaggccgggcgcggtctctcatgcctgtaaccccagcactttgggaggctgaggccccagctgggtgtcaattttttttttcttatcaacattataatgaaatgaggttttttcaaggacctgctgtatgagactaacccagagtaatttttcaaattacctgatttaatgaatcagaatttctaagaaatagctggataatctacatacttaagcatctcaggtgattcttctcattagggagatttgggaaatttctagatgagtgcttctctagagttaatgtgcataggaatcacctgggatcttgtttataatgcagtcttagggctgggtgcggtggcccatgactgtaatcccagcactctgggaggccgaggcaggcggatcacgagatcagtagtctgaccaacatggtgaaaccctatctctactaaaactacaaaattagctgggtgtggtggctcacgcctataatcccagctgctcaggaggctgaggcaggagaatgacttgtactgggaggcagaggttgcggtgagctgagattgcgccactgcactccagcctgggcagctagagtgaaacaatgtctcaacaacaaaaaagaaaaaagtagatattgctggtagctctgtttttgcctttcaggagcacttctgaagagaatgaggcttttttgagaggaaggaggattaatcatgaggacatgctttggaaggccagagtttgctgtcccgtaaagagattgtggtagagattttattttcagttggattaagtctagaatcacattgatagtgatttacattgcctgaagtagggaatttgctctttaggttggtcaattaattaggtccgtattctagatttgctagaaaaaggagcaactcacttgaagagctttgtggtggttgctcttatttcatatcctcacatgtttcatgattaaggatgaaaattgggcctggtgttgtagctcacacctgtattcccagcactttgggaggcaggggtgggcaggtcgcttgagcccaggagttcaagaccagcctgggcaacatggcaaaaccttgtttctacccaaaaaaacaaaacaaaacaaaattaactgggcttggtggtgcaggcctgtagtccccagctaacttgggggttgaggtggatcacctgagcctgggaaggtcaaggctgcaatgagctgtgattgcaccactatactctagcctgggcgacagagtgagatagggtcttgaaaaaagtaaaaaaagaaatatttgatttgaaagatagcataatttggttgaatattttgtaaattaaagttgtagtaaaagcagaggagtttgaaattttggactgtcaaatagaattgtagcagaagtgttatagttgctatgaggctagccatagacatattttagtgaattatctgacttatagtgaattataggagactttagtgaattatatgagataaagacatattaatactttctgcaataaagaatgtaaatggatactatttgaatgggctaccattatgtttatgtaagctataattacccaaaataacagggaaacagtgttgtaccttttaaaagagcttagaatgctaagatgattcttaccttgcaatttcaactgcagattttgtattttattaagacacgaaacaaatttccattcatttttactaatatgtagatattttgcagaattcttttgtgttcatgggacacataaagtttgagtatggacattggaagcatacaggtctgagtttgaatctcagttctgtcacctgttgcttgggtaactcacctgagttcacagctttagtttatctgaaaaggactgtgtcttaatctgtatgttctccttggcatgtggcccagtcaccgttacatagtgggcatttgtttattccacaaatgtctgttgctcatatactgtgtgccaagcactgtcttaggtaatagagatacaagtaatcatacaaataaatatgaaaaatgaaccaataagtattgtgaaggagaagtatgggtgctatgatagtttataataaggggtctaaaaaaaaggaggatgaggtagcttttaaaaatgattactttggctgcagggtagaatgatagattagagctaagaaatnnnnnnnnnnnnnnnnnnnnnnnnnnnnnnnnnnnnnnnnnnnnnnnnnnnnnnnnnnnnnnnnnnnnnnnnnnnnnnnnnnnnnnnnnnnnnnnnnnnnnnnnnnnnnnnnnnnnnnnnnnnnnnnnnnnnnnnnnnnnnnnnnnnnnnnnnnnnnnnnnnnnnnnnnnnnnnnnnnnnnnnnnnnnnnnnnnnnnnnnnnnnnnnnnnnnnnnnnnnnnnnnnnnnnnnnnnnnnnnnnnnnnnnnnnnnnnnnnnnnnnnnnnnnnnnnnnnnnnnnnnnnnnnnnnnnnnnnnnnnnnnnnnnnnnnnnnnnnnnnnnnnnnnnnnnnnnnnnnnnnnnnnnnnnnnnnnnnnnnnnnnnnnnnnnnnnnnnnnnnnnnnnnnnnnnnnnnnnnnnnnnnnnnnnnnnnnnnnnnnnnnnnnnnnnnnnnnnnnnnnnnnnnnnnnnnnnnnnnnnnnnnnnnnnnnnnnnnnnnnnnnnnnnnnnnnnnnnnnnnnnnnnnnnnnnnnnnnnnnnnnnnnnnnnnnnnnnnnnnnnnnnnnnnnnnnnnnnnnnnnnnnnnnnnnnnnnnnnnnnnnnnnnnnnnnnnnnnnnnnnnnnnnnnnnnnnnnnnnnnnnnnnnnnnnnnnnnnnnnnnnnnnnnnnnnnnnnnnnnnnnnnnnnnnnnnnnnnnnnnnnnnnnnnnnnnnnnnnnnnnnnnnnnnnnnnnnnnnnnnnnnnnnnnnnnnnnnnnnnnnnnnnnnnnnnnnnnnnnnnnnnnnnnnnnnnnnnnnnnnnnnnnnnnnnnnnnnnnnnnnnnnnnnnnnnnnnnnnnnnnnnnnnnnnnnnnnnnnnnnnnnnnnnnnnnnnnnnnnnnnnnnnnnnnnnnnnnnnnnnnnnnnnnnnnnnnnnnnnnnnnnnnnnnnnnnnnnnnnnnnnnnnnnnnnnnnnnnnnnnnnnnnnnnnnnnnnnnnnnnnnnnnnnnnnnnnnnnnnnnnnnnnnnnnnnnnnnnnnnnnnnnnnnnnnnnnnnnnnnnnnnnnnnnnnnnnnnnnnnnnnnnnnnnnnnnnnnnnnnnnnnnnnnnnnnnnnnnnnnnnnnnnnnnnnnnnnnnnnnnnnnnnnnnnnnnnnnnnnnnnnnnnnnnnnnnnnnnnnnnnnnnnnnnnnnnnnnnnnnnnnnnnnnnnnnnnnnnnnnnnnnnnnnnnnnnnnnnnnnnnnnnnnnnnnnnnnnnnnnnnnnnnnnnnnnnnnnnnnnnnnnnnnnnnnnnnnnnnnnnnnnnnnnnnnnnnnnnnnnnnnnnnnnnnnnnnnnnnnnnnnnnnnnnnnnnnnnnnnnnnnnnnnnnnnnnnnnnnnnnnnnnnnnnnnnnnnnnnnnnnnnnnnnnnnnnnnnnnnnnnnnngaagaagactttatactgagctttgagaaacactgacttttcagattggttggagggaattaagaccaccaagactgagaagcaattccttaaagctaggagagtgtttctgggaagccaagtggagagagtggtaacgatctactttgttctgaagggtcaaacaagataaagactggagagtgtccattgggtttagttacacaaagatcatttataaccttatgtaaagccatttcagtggtgagttggaagctgaaagagatggatattgctgggtatagattattctttgaaaaagttggattgaggaagaagggagaatgtggtagcttaagggagaagacactcaaatattggctgagtgaatacatgtgcaacatgaacctcctttagaaaataacaagcacaggctagcaggatcatctctgaggaggataggaggaggacctgttagggatatcagctgaaacatgaatagtctgggatcatagttttttgtgtttcctatgatgtgccagatgaaggaagaagaatcttgccagaaggagaaatgtcatttttagaacaatggtataggaatcgttgaccacccttacagaaccctcattgctgagaatttgatatattgttttctaactatcaccaagtatagcggaaagagtctgggattggagcctggtaatactgctttgctattttcttgtgttaggtcgcacagttgattatttagtcctaaagagcttcaatttcttcatttgtataatggagcgaatactgtctacktcacggatttgttaggattaaatgacaatctgtgtatataaagtagcaggtatttagtaggcactcaataagctgatgtctacctgttttcttgcttctcatggtaacagttgtttattgtgtagtttcagcattataagtttgctcttagcctcaaaggaatcatttgtgggaatccttccttcttcatcttatcttttgtgtaaaataacttgagtgatacaagcatacatttctggggaaatggaaatattatttgctactgcaataataaccaataaataagtattttgccagtcgtttttggcatgtatgccttatatttgtgtgcctttaaaaaaaaagcgtgtgtgttttaaacaaagcttactaatttagatatgccaatttggtaacttcctgccagagtaagagtttttatgttttccttctgagacacaccttagtataactttattttagtttctgggccattgccatttggcataacttcaaactagatgtgatggacccacataaatacttttaagatttaaaattytttttatggtggggggatatgaactttcaaaaccagctgaggtgtcaggtctggattttatttggttgtttaatttttttttttttttgagaccaggtcttcctcactctgttgttcagggtggagtgcagtggtgtgatcacagctaactgcagccttgacctccagggctcaatttgatcctcccacctcagcctcctgagtagctgggattacaggtgcatgccaccacagctgactaatttttatacttgtttcttttgtagagatggggttttgttatgttgtctaggcaggtcttgcactcctgggctcaagcaatctgcctgccttggcctaccaaagtgctgggattataggcatgagccatgtgcctggccatttaaaattttttgtttgtatttttgattttcgaattttttttctacacatattttgaacactgagataactaattgtataccaaaatgactgaaatgaagtcagtctgatttccgtaagtttgattgctaaagcagtctccttaaaggtgttaaaatgtgctytcaatccccaccctacacaacatctgtctcccaggctgaagtgcagtggcacaaacatggctcactgtagccttgacctcctatgtttaagcattcctcacacttcagcctcctgagtagctggaaccacagatgtgcrctgccatgcttggctaatttttaaaatttttgtcgagtcctggtctcactgtgttgtccaggctgggctcaggagatcctctcacctctgcctcccaaagtgctaggattacaggcattagccaccactcctagcctatgtatgaacctttacggaagttgattaccctagaatttttataagagcattagaatttgccagctttcttcaagagttaatataggccgggcgcagtggctcatgcctgtaatcccagcactttgggaggccaaggcgggcggatcacctggggttaggagttcgagaccagcctggacaacatggtgaaaccctgtctctactaaaaaaagaaaaaaaatmcaaaaattagccaggtgtggtggtacctgcctgtagtcccagataccctggaagctgaggcaggagaatcgcttgaaccctggaggcagaggttgcagttagctgagatcatgccactgtacctccagcatgggtgacaaagcaagactctgtctcaaaaaaaaaaaaaaaaaaaaggagtcattatagtagtaatactatagtaaacacatacttgatattctttggaatatgggccttactatgaaataggagaaattatttctttcccagttactaataagggagacttcattggttaagggaattttgtgggtagaattgctaagactagaaatctcattgttggttcaaagagagaaataagttaaccacgtgttctcacctgaatataggatgctttgctttacaagcttaaataatacccggacaaaactctacaggtcacaagttctttaaagacttaataaactctgtagaaactatacttcaaaggggaaccttctccttgattcactatcctgccttgtcttctgaaatttattggtttttgacaagcgtttgaagaaagaccactaaaatacagtgttgttaatatttggtgaaatgttcttgtacatacatctgttatagattttccaagttaaaaattacttttccattagaggagctccccataccttgtttctttccccaaaggggtgtgtgtgtgtgtgtgtgtgtgtgtgtgtagtttataatgtattttactcttttgactttggaaatacatagtatttcattgtataggtttggcacaatctactttttaactctaatttttagacatttgaaccttggatgatatggaatactgtcattagtaagttttatgttacctttctttctttctttctttctttctttctttctttctttttttttttttttgagacagtcttgctctgttgcccaggctggagtgcagtggtgtaatctcagctcactacaacctccacttcccgggttcaagtgatttccctgcctcagcctcccaaatagctgggattacaggcacctgccaccacgcctggctaatttttgtatttttagtagagacgggatttcaccatgttggtcaggctggtcttgaactcctgaccccaggtgatccacccacctcagcctcccaaattgctgggattataggcttgagctgcatcgcctgaccagcttgctttcttaaaaaatattctgattcctgaagtttctttttttcctttttattttttcgaggagttttgctcttgttgcctaggctggagtgcaatggcgctatcttggctcactgcaaccttcgcctcccagattcaaacgattctcctgcctcaacctcctgagtagcttggattacaggctgccacctgccaccacgcccagctaatttttgtatttttagtagagtggctcagcctgtaatcccagcactttgggaggccgaggtggacggatcacgaggtcaggagattgagaccatcctggctaacacggtgaaaccccgtctctactaaaaataaaaaaaaaaaaaattagctgggcgtggtagccggcgcctgcagtcccagctactctggaggctgaggcaggagaatggcgtcaaccctggaggcggagcttgcagtgagcagagatcgcgccactgcactccagcctgggcgacacagctagactccatctcaaaaaaaaaaaaaaaaaawaaaaaaaaaaactcaacacgtgttaaatcgctaaagtctgaagagcccagaaaagaaaataaatatcattagtaatattctcaccatcatccaaagattaccccttttaacattttggttgcttatctttccagtgctttttaatgtccatatacccacatttttttaaacccatgctttaaaagaaaaaaaaacttgtgatattactgcatgtatacatatattttgtaattttcaatataattgtctgaaattttaatggttatatggtatttcactgtatgtatttggtagaagtcactttgcccccatttttggrtatttaggttatttgcaattgtgctattatgctgtgtacaacgtccttgtggaaactttggcaaaccttgggttgtccatctcaaactctctcactgtactctgtccttttcagcctgcttctctctcttttccagtaactcctttaacaacaagatcagatcaggtggacagattattcttcaaacaatttactattaggcaatgaatatgctggtttctgtgaattctgggattaaagagatacatagacacattttatttgcagagataaagaattacaataataaactaagtgttgtgataggtttatatatgtataaggtccatgggggctcggaaagagagcaggggttgtgagggcagtaggcagggaagaaagatcagggagtaagcatttattaatcctcttaatgtgccaggcactaagttaggcacattactaggctcttagtttgcagcagttctgggaggtatgtacacagtattattcttacttaccagatgaggaaactgagctcagacaggtaagtaatttgcccaagctcccacaagtagtaactgggagaaagccagaagtaaacccagccagatatacttgactacccaactctgtccagtactccaccctggcacaccaaaggattggttccaccagtagctgaatggaagctagaatggcaagtaggcattagctaggtggagggggtggggtcattgtgtagagcatgtcaagaggtttgaaataggtatgaggagtaggtgagatgaggcttaagctaaaatttaattgttgtgttttaaaaatgtatagtaagattgactcatttagtgtacagttctgtgaattcagataatatggaatttagtcctgtaaccagatacaatcaagatactgaattggtgtgttacctccctgagtgccctcattcttcttctttgtagtcagctcctcccaccagccttgacttttggcaaacagtgatgtgttctctatcctatatgtcatataaatggaatgtcatataatgtcatataaatggaatcataaaggctatatagtatgtagccatttgagtctagtctctttcacatagcataatgcrtttttgattatgccaagtactgtgatgtaaatgttactgtacagttttgctgtaggtttttgtccctttctaaatgtgcttatatcacttctaaccctagttccatgtaaacagaatgttttttggcaaagaagttattaagttatagcttcaaataccatggaagccctaaatagtttcccgataagtggccaggagaaagtacaattgaaaaaaatcagctgtctctcccagtaccctttacctcagttatctccttgcttttgacatataaaaatcacgtggccggtttactactgattgtgacctttgccatcttaaaagggaagagaaagaaagcgaacagctgtaccatgagggagtggaaggaattaatgttgttcttggccagttggcactgttttcttgtgcctttctgggaagggaacaacaggtgagaaggtttgctttttgtttttgttagtgtataaataaataggttaacttgttttttatttgtgtggaaatgtgagagtccatagtgaagtaacttgccctaatagctcgtgattttttaaaagctcattaaatatatacacaaatttattttaagtgtcttaatgaactaagctactccaaggttgaggatattgtaggcaattactgacgtaaaastacaaatgtaaaaaccatctttggtaagtgtcacttatatcctatatcccaactgctttttctcccttttatcctaattttaaaataaaaaagaaaagataacgaagaactttttataataaaaccatgtcagccacagagagatggtgactgtaagctaagtgaccagaatgtaggtgcctctaaaagttgagggtgcactgttctttgaattcttgcctgttaacacttttcataacatctctgtgaatcacactcaaatatactgtacagtgctatcactgatacctctcacctgccaccaggctctgccccttccctaccaataccttgcacaaattcattgtcctgaagcacagctttcttgctcaagaaccagtgttgatttttcatttcttattgaaacatacacaaattgtttacctgaaattgaaaaccttcatgctgtagttttgctttgcccattcacatttatttctctttgttactcattcccctctacgttactttagtgaaatcatcctgttttttagttgtctaacagcagattgagttcagttaccaatttttaaattcagttctaattccatttcacattgtagttgttttgactagtttttttctactctattaaaagctctagttgttctctgctctcctcacttatctgactctgaaatcttctaaatggtacccactttatttagaacgttttagggtcaaataagtacaggttggaatcctgagtgcaccacttaactattgaggctgacagccagtgtacacctgggtcttcacttcccctgccccatgactcttcattgtcttagtcccttctatggacctccctatgatacctcagctaaaagtttgaagcagaacccagctcctctagcaccagctagtgtctgttctgagtggccgatgctggtacaagtatgagttattaaatatttttaatttcaccctgtttattatatgtatgattttaattaagttacttgtcctttctgagccactcccagatctttaaaatggggataataatacctgttttgcaggatgactgttcattcatcaaatatttgttgaaggcctgccttgttctaggcaatgacttaagtacttgggatatattggtgaacaaaacagaaatgtctgtgccttcttggatcatgtgttttagaattatgagaattaaatgaaaataaatattcaatatggtgccagacacatagaggtgcccacagtgtcttatctcactttcttcctgcttgccatatcttttccatcagggccaaagagaatgggaagtgggaagaaataaacttcatatttcatttgtatagctgtggagagtagcaggccctgggtccctttggggaggtcatgcgaactgggcatggccttctgtcaagaattattagaccaggcatggtggctcatgcctgtaatcctagcactttgggaggctgaggcaggaggattgcttgaggccaggagtttgagaccagcatagccaacatggcgaaaccctgtctctaataaaaatataaaaattrgccrggcatggtggcacatgcctgaaatctcaggtctccaggaggctgaggcatgagaattgcttgaacctgggaggtggaggttgcagtgagttgagattgtgccattgcactcccacctgggcaacagagtgagactcttgtctcaaaaaaaaaaaaaaagttttcagtgatcagtgtgcagatataggtggactaaaaaaatcatcagtgaccttttatctgtactttgttcttttactactcaatgagactgagagcctgctggattcactaagaccaggtgaacccagagggctctcggtctcattgactcaattgggtttgaatctcaattctgcaacctacgtggctttgggcaggtttcctcattttcaaaattatacaataatatttaccttttaaacttattgaaggattggaaagctgtaacacctagcatgctgtcgtggcataaggtgggggttaagtaaaaagtagctactattaacatttttgaaaagtgctccttcattttccctgctccctttcatactcttcatcctactttcctggtagttcatttcttcttagttggctgttgactttctcttttctttccaagattatggctcatgccactttttccgagcaatcttaaagtctcatggcttcagctatttcctttataactgataattccagatattcatcttcagtctgtattcttttctgagtgccagatatgaatgtctaggtgtgtgctagacatgaaacatgtgccaaatgatcaggaatgataatcaggatggagtctgtatacttgacctacagaggaaacaagctgtcttatctggcaaactttttagttttgcttattaagttggtaaaattttgaatgactttctttactcttggacatctaatgatcttttgtaaagaaggggaagagaaccctttctgttcagaaataacacacaacttgattagtaggagaatttttcatgtgattctggaaagaatttgcaacacctgtttccaaagaaagcaagaaatatattgcatatttttctccccaaaatgtattttgtccaaactgaattggacacagagaacattccttaagtttggaataaataaactttctgaaaactgctcaggtaacaaagtagtaaagagccaaaaaaaattttatttacttctaacctttgactactaaaaggagaaaatgaaagggttcatggaagcaaacttcacaaaagtaactgtagacttaacttgtcagatccaaatatacatgtagaaaaatgtacaaacatggttaaatttacatatgccggaattttggggggaatggaatgtgtttcttacatattagttttatttattacctttttggtaaaaaatcagctcctagaagcaactcccacactgtttatttttcttatacattttgctgaggtttcaacatttctcttccatagtttgcagcaggatggctacttaaccaaatttaatagggttaagatttattgtgtgtatcacatagagaccctggaagttaggctcctttcctaagagagaggctgtgtaatgtggtgaaaagaagagaaactttttgttaaagttttggtttccctgcttaccaactgtgtaatactggattatctgccttagtgttcactcaagtgctgtgcacttgggtgagttacttagtgtctctgagtttgatgaaatttagcccagagatacaattagtgccttttttttttttttttagtaatttgctgtatttgtgtcttcttttatattcttaagctaaagtaggactgaccatttcatcagcctgtttaaaaaaaggcatttggttttgttgatagtcttttcctttatttttcatttccttaatttctgttctatattgcttttagtttcttgagcttttaaaaataagrtttttgttttgttttgttttgttttgttttgagacagagtcttgctctgttgcctacgctggagtgcagtggcgtgatctcagctccctgcaacctctgcctcccaggttcaagcgattctcctgcctcagcttccagagtagctgggagcacaggcatgcgccatcatgcctggctaatttttgtgattttagtagagatggagttttgccatgttggccaggctggtcttgaacacctgacctcaagtgatccggccacctcagcctcccaaagtgttaggattacaggcgtgagccactgcaccagccagttttattaatttctaatgcaggaatttaagggtttacaattttcatgtggtattttagctgtatcctttaagtttcgacttgtggtattttccttgttcacttttaactattttgtcatttaccttttgacttttcttgacctgtgactcattgactcttaagttttcaawcatagatattttggggagacctttttttttctccgttacagaattgttaagattagagataatatgtgggcaaatatcaggcaaatagtagatactcaataaatgttttcatttttccttaaagaaataaacctctgctatttgtttttttttttgcgtgtgtatagatgtgtagagatgggagtctccctatgttgttcaggctggtcttgaactcctggcctcaagtgatcctcctgccttggccttccaaagtgttgggattacaggtgtgagccactgcaactggcctaacgtctacttttgaaatgagaatgggaaatacacaattgccaataagtgtaaataatactaaaagtgactttagttctgcatgatagccaattgagtagatgaagtatagaaaatatagggggwtgataagaagagggtaaaattgggaggaggtaagggagagaaggaaatttagcccttccaaattctttctctagaatttagagaggatggctcacacctgtaattctagcactttgggaggccaaggcggacgcatcacttgcgaccaggagtttgagaccagcctgggcaacatggcaaaatcctgtctctacataaaatacaaaaattagccgggtgtggtgatgtgcacctatagttcaagctactcagaaggctatggtgggaggattacctgagcttcagaggttgaggctgtggtgagccatgttggtgtcactgcactcaagcctgggtgacagagtgaaacactctcaaaaaaaaaaaaaaaaggaaagttaggggaaaaagtggaaatatcaaaagtggaaatatcaagtgttaattccagtcttctgtgaagtcatattctgctgaacagtttagtctatgggcttctatatactaattattttagattatatttcttacactttagtaatagaagtgtccttagatgacctttagtgtgtatgtgtatgtatatgtaggtgcatgttgccctgcatggcaacaaaaattttgtttttggggaaagggtccctagtttcattagtcttttttttttttttttttttttgagatggagtcttgctctgtctcccagactggagtggagtggcacaatctcggctcactgcaacctccatctcctgggttcaagcgcttctcctcctgcctcagcctcccaagtagctgggacaacaggcgtgcaccaccatccctggctttttttttttttttgatacagagtctctgtcgcccaggctggagtgcagtaggacactgtctgctcactgcaacctccgcctcctgggttcaagcaattctctgcctcagcctaagttgctgggattacaggcrcctggtaccacacccggctaatttttgtattattagtagagacggggtttcaccatcttggccagcctggtcttaaactcctgacctcctgatccacccacctcagcctcccaaagtgctgggattataggcgtgagccaccacacccggcctaatttttgtgtttttaaacaaaattgcctgatctcaggcaatccacccacctctcaaagtgctgagatgacaggtgtgagccaccgcacccgttccattagtcttaaggaggtccataatccccaagaaattaagaaccacccctccctccctcctctcccattcctccccccccttcctcccccctctacttcctcccccctctacttcttcccctgccccctctcctcccctcctctctcccctccccttcatcccctcttccctcccctccccttcctccccttgggatccttagagtcgactacaggnnnnnnnnnnnnnnnnnnnnctcttccctcccctccccttcctccccttcctccccttcctctccttcgttttgagacagcctctctctgttgcccaggctggagtgcagtggtgcgacctctgctcactgcaacctccacctcctgggttcaagcaattctgcttcagcctcctgagtagctgggattacaggtgcacatgctaccatgccagactaatttttgtatttttttttagcagagatggggttttaccatgttggccagtttggtcttgagctcctgacctcaggtgatctgcctgcctcggcctcccaaagtgctgagattacaggcatgaactaccgcacccagccaagaaacaacattttagacttcattagttgagataaattgagaagcttaaaaggaagtaatttattttttcctgctctgatagtaatgactacttcccacttgagtgagatttggtgttccttttaattcctcacattacagccagatgaccaggcaatatactaagatcaggatttgacttttaatgtagtgcaacttaaaactactgaacatgatatgttataagcataaatattgtaatacctggtatgaattacaaaactgtaaatgcctttgattagtaaagttttgatacagctaagccaagcattttgggcctcacctgagggtaggaacagttctgggagtaagaggaagcagttggtagctgcagtggagatgcgatactgtaaaaggcagctttggacagccagaagacaagaagacactgttgggttagagatgaaaggttttaccccaggacaaaagaatagggaagacctgaggctggtgagagaggtaggagggtacccagtcatacttgactggctctcttgcttccctttacatgaaggcgtcattgcctgaaaagagaagctagctcaggattctaaaatttgaaggatgaagcagtgataggttcttcagaggaagcactaaatgtatgcacgtgggggagtttttttttctgagcactggctcacaataaaacctatgtttactcaagtactttataattattccctcttatgtttctggaatcaaaattagtgccttgtgttaatatgttttggaaatttaatgctcaacctgtcagtttatttttaaccccctagatctgcattatccagcatgagatccattagctgcatatagcaatttaaaattaaattaattaaaatttaatacaattgaaagttcagtccttcagtcacactagccatatatcaagagctctgtagcctcatgtgactagtagctactgcactggacaacacattgtattggacattttttttttttttttgagacggagtctcactcttgtcactaggctggagtgcagtggcacgatctcggctcactgcaacctccacctcctgggttcaggtgattctcctgcctcagccttccgagtagctgggactacaggtgtgcgccaccatgcctggctaatttttgtctttttcgtagagacggggtttcaccatgttggccaggatggcctcgatctcttgacctcgtgatctgcctgcttcggcctccctaagtgctgggattacaggcatgagccaccacgcccagcctggacatttcttttatcacagaaaattttattggctagcactgccctagataaaattatgtattttctttcctttttctcccatcagactaaagctggtttatattaatgcgtaattaactttgatatttgaaagtaaaaaacttgaaaggcttactagagtaatattcttttgctttttacataattaaaaagacagtgccactcttttataatgatctgcctgagtgccattattttataagatttttcaagaagtggtgactaaatcaaagcactgttatggcttgtatttatccccttctactgaactcttgagtctcaaggttatttctactctctctgtaagcatgtctggaagggcccaaaatgttacaacaaaatttccaatttaaaaagttagtggcggggcacagtggctcacgcctgtaatcccagcactttgggaggctgaggggggtggatcacctgaggtcaggagttccagaccagcctggccaacatggagaaactctgtctctgctaaaaatacaaaattagccaggtttggtagtgcattcttgtaatcccagctcctcaggaggctgaggcaggagaattgcttgaacccaggagttggagttggcagtgagccaagatcacgccattgcactccagcctgggcaacaaaagcgaaactctgtctcaaaaaataaataaataaattagctttgtttcatacatttttaaggaaatatcatagatctctaaagttgcaagagagggaaaatcgccaaaagtaattattttgctgtagggctacttctctgagaacctatcaattaggcataaaggctatacgttagtttttactgctttgtgtttttttgtttatttgtttgtttgttttttttgagacggagtcttgcttttgttgtccaggctggagtgcaatggcatgatctcagctcactgcaacctctgcctcctgggttcaagtgattgttctgtcaaagcctcctgagtagctgggattacaggcatccgcctctgtgcccagctaatttttgtatttttagtagagatggggttttgccatgttggccaggctggtctcaaactcctgacgttgtgatccgcccgcctcggcctcccaacgtgctggggttacaggggtgagccaccatgcctggcctgctttgtgttttaacagagtaagaaaatagacttttcctttgctctagtttcaatcttcttaatmtaggtaggactttttcagataaatttatgattaattacaaggaaaaggatagtatggatgatttcaggtaagttataggcataatttcaagaaacaaaaaatgtttttattgtgatagagcatctcaaacacctttagaatctacctctttttcctgttcccyccgttatttctttgtttcaggcccttaacatctctcatatacactggtatttcttgcctctggccttgccgtctattctgtcttcacrctgcttttttctttacacagctcttttyacagccccctcagttagagtacagattggattgtgtgtctccctgctamccacagaataaaacttcaaatgtgatgattttggtcttttgttttattataaaatattcaaacatggaagtatatacagtagaaaataagttttctccctgatttgatttgtattagtaccatctctgctatttagcccccactgttaaatttgactggcttaaaaaaaataccatctctgaagataactacttagaagttggtcatatgtttttccagacttcccaatgtttatttatatataaacataaataattttaggccaggcgtggtggctcacgcctgtaatcccaagactttgggaggctgaggcagggggttcatgaggtcaggagatcaagaccatcctggctaacacggtgaaaccccgtctctactaaaaatacaaaaaattagctgggcgtggtggcgggcgcctgtagtcccagctactcgggaggctgaggtaggagaatggtgtgaacccgggaagtggagcttgtagtgagccgagattgcgccactgcactccagcctgggtgacagagcgagactctgtctcaaaaaaaaaaaaaaaaaaatttttagagaaatcaaattataccatatatgatgtttttacttattttgcttggttttatgctgtatactcattgattatatttttttgttttaatttttaatttttccatattttatggtaggatgtcaaatataaatatatctcttatatctgagatataaatatatatgtgaaatataaatatattctaccggattttatggtaggatatttgaaatatatattcttttatggtattcctataagaatatatttatatttcaggtatatatgcaagtaccttagcattgcggtgacttataataggtgctcagtcaatgtttgtttccattcttcttggacatatatgagaagggccatataagattattaactatttatttatttatttttttgagtagtgaaactctaaagactcacagtctgaggactcatggagttgttcacatccatgaacaacaatgttatgaatcttttagttataaagcaaacctttctctggagcatgtttgtgttttctcatttaggtttataaattgctctgagactagcaggattgctgtttaagagtcttgtgaggtaggctgcctgattattttaggtgcttccagtaagagcagatatttttttactggtgaataagagaccacattataatttgtcctttttactgagagtgcatagtatattgtatactgtaaacttgtatagtatgtgaaaactttttacatgggaatcttggaacaaagtcttagatgtctaactcgtttgctaactctgaggatgtggaggatggatatggacataggaagttcaacatgtgtatcatggagtgggatatgtaggtgtgtaatctatgatacagtttcagatctgagagtttctagtggttctagagaagagaacaggatggatctggagctgttgttaattatttgtaaagtcctattttgaagtgtgattgctttttactcttcagcatctcctttggaaatcttatccctctactttcctgcagggagtttgttttgggtggatcagtaaagaggatgcaattggggcctcaacttcttttctcattgaggaaagagtgaggggtgctgctgagagctmagtgcttctacagtagccatatttgaaggtttgcttagaggtaatgctggagcgtacacaaattgccttcaagattccagtagtttgtgatttaaaaatttgtttgagcagttaacatgggtatattcagtttgtttatttttgttagcagtttgtgttcccaatggaaaacagcgtgagaaagagttgctagagtatagaattgtaagtgcttccctagcgtgttcttggacttcagattgttcacctttttttttttttgtcccttcttggtttgtttgtttgaacttgagccctttggtgtgacaagtcacatacagcttttcaggatctaagtttatggttacataagattattgtttatatgtttcagaagctttgctcacttgtttattcattcatttcataaatattccttgaaatgcttactgtaagcaagattatgcagggcatgttattaggtggtaattagggaaagggaaaaatggaaattatattttgcagatacaacaaaggctgaagaggtgtgtgtgtgtgtgtgtgttttagatacacacacatctatatgtacacagagacacgatccacagttgtgtaggaataacttcctaaacatctttaggatctacctctttttcctgttcccactgttatttctttgtttcaggcccttaacatctctaatatacactagtatttctgtcttcacactgttttttttctttacacagctcttttcatagcccctccattagcacacagattggaattgtgtctccttgttacccacagaataaaacccaatgttcttaatatgtagtcttaatatagactctataaatagcccctttgttaatctatcttgaattactcacttttaggtttcagctccctactgagaccccaactggctttaccttctgttccctcctggttctgcttatcttccattgmccctgtggacctgctttctgtcattgccttccctgccctcagtctcaggagcctgagactggcttctagatgggtttggacaatggatagcactggcaggaggagagtagagttgctgtgtttattttcctggtttcctcctgcaagatcatgtcatgttggctctcccagagggcatggctcatatcatggggccctctttgtctttccaagyctgtagatgatagcagcttcaggaggttgcactatcttttgactgtgcccacacccttcacaccttgtaaatagtccctttcttaaactctccttaaattacccagtttgggggtgctatctgtttcctgctgggatcctgatggctgtgttgcccaaacctaaatgtcagtcatgcttgcagttacagctgtgttattttcctgtagtactgatttccctcttttattaaaagttctgtggtggctgggcatggtggtttatatgtgtaatcccagcactttgggaggccgaggcaggaggattgcttgagtccaggagtttgagaccagcctaggaaacatagtgagactctgtccctaccaaaaaaaaaaaaaaaaaaaattagccaggaatggtagcacaggcctgtagtcacagctacttgggaggctgaggtgagaggattgcctgagcccaagagttcaaggttacaatgaactatgatcctaccactggactccaccctaggtgacagagtaagacccagtctcttaaaaaaaaaatttctttgaggtctttttcattcttcacctcttttagtcttttttcctttcttctttcttggcgttgcagctgccatattatggcagtggaaatgtttgaatgaataaggaggggatggacatctgagtttccctgttgtgtagcataatattcatttaaatgtctgaaatgagatctttagagaaaattgagggagtgggtacatgaatcagtgtagtcactttaataacttgatttttatttcattgttttcaaaataaatttagtactttttctttaccttctacatattagggattaacattgatttactttagtctttctctttgtaaaatgcattttagatttattccattggaatattttgtaatagcacatatttgaggaagtatgtatgacatatatttaataaaatggaagaggtttcaattatcactgaattgaggagaatatgggaacatctgtttacatctatccaggtattcatgtgtctgttttcctcaacatatcataggagtagtgcactaagagcagacatacatgcctaacagttgtgtttagcaagatcaaaatatgtatgtggtactgtcacccatggccctgataggaaacagatggcatattcaagctggataatttgaagaggattaaatgaaacaagtattcacaaataggtgggcagagtttagaaaatcaacaagagatattgtagtatcctgggctagcaacagagaggatgggaatattgccccatagacctgaagtgcaaagagaaggagtgctacctcaaaaagagagctttgtggagaaggctgcctgatagcagctgtagtcccaggtagagggtgagccaccacgcccggcggttattacatagttttaaaagtgactcctcttaaggaaattttaattaagagaaaaatatcctagaactatgattagggtcaaaacagtatctatgttctttaggtattaaggaaaaagtgtatctgtcctaagaaagtgtttataaggagaagagtcttcctagaacactaactttaacacagaactctcatcactactctaaaaaattaacattaaaaataatcttggccaggtgtggtggctcatgtctgtaatcccagcactttgggaggccgaggcaggtggatcacttgagggcaggagttcaagatgagcctggccaacatggtgaaaacccgtctttactgaaactacaaaaattagcggggcttggtggcgcgtgcctgtggtcccagctaatcaggaggctgaagtcggagaatcacttgaaactgggaggcagaggttgcagtgagccaagatcgcacctctgcactactccagcctgggcgacagagcaagactctgtctcaaaacaaaaacaaaaacaaaacaaaacaaaacaaaaatgatctcagtagcagataaagactattccattgctttttggaatagtgatacctgtttactctggagggatggacattcctctgtgtgtgtgtgtgtgtaatacatatgaacaataggggacataattttgacatatttaacttgaagaaaggcatgcttagacaatgacaacccgatattgaacaatgctcaatactaagtttctttatgaagataccattgttgtattagtggagacggtataatatattctcagtaaagacctcagtctttactcagttctcatgctccttgatgtcttagcatttgatatattagatttgccatgtactagatactctgagctttggtttttgtatcacaacattgtcctacttctctattgttcattcattcttttgtttaaagaatggccagactatgctgctgaacaagacagacacagcccttgccccttggagcctgtgagcatcctttcttcctctcctatagcctcttttcatgttttctctgtggatattagtccttagctaattgctttgtttcttttagtcttgatttgccttctgtaagaactgttttattctcctagcttaagttgcaaattctaatgccaacaacttacacatctttctctacttctgatctttaccctgaattttattcacttagccatttaataaatttttttttttttttttggagacagagttttgctcttgttgcccaggctggagtgcaatggcgccatctcagctcaccacaacctctgcctcccgggttcaagcgattctactgcctcagcctcctgagtagctgggattttgggtgcccgccaccatgcccggctattttttttttttttttgtattttttttagtagagacagggtttcgccatgttggccaggctggtctcgaactcctgacctcgtgatctgccagcctttgcctcccaaagtgctaggattgcaggcgtgagccactgcgcctggccaataaatttttgttcagatctgtgtgcctggtacaaaggatacaaaaatggtaaaggtagcctttgccctcagagttgctgacacacacataaaaagttaaagtacakcgtgatagacatatgtacatggtgccatgggacagataagaagggagtacctggcttggacttgaaggagaaatgagagagcaactatccgcagtagaaggctgagcatttcaaatccctgtgaaacctagggttttgaaaacagtatgtttcggcaacagcaagtggttcagtgtgattggagccttaaggggacagtggaagatgaggctgagcatttagggaggtgccagattgccccaaaggcagtgttctcaatactaaactaatgttcttccaccataaatgagctccccctggcaacttctcatttctatcaatggaactttcgttcttcatatgtccaaaccctgaagtgccatcttcaggtctgcctcagcatttgtgatcagtgctcaagttttgtatcatttctatattcaaaacattcttctgtgcatcctattctgtttccactatctacacactacttatcacctaattagtagataatttcaaaactgtaaatatttgtgtttcttcttgctctctctctcccttttttttttttcctggaagttaatttctaaaattcctcattttaccatgttgctgaccctgagcaaaagaggacagtgatattttatttcctacaaacttacatcctttccaagtgttttaaacccataatcctttttctttctttggagttgggagtcttgctctgcacccatgttggaatgcagtggcataatcatggctcaccgtagcctcgaattcttgggctcaagtgatccttctgcctgagcttcccaaatgtctggactataggtgtgtgccactatgaccagctattttttttttttttttttgagatggagtctcgctctgtcgcccaggctggagtacagtggcgcgatctcagctcactgcaatctctgcctcccaggttcaagtgattctcctgcctcagccttccaagtagttgggactacagccactacgcccagctaattttttgtatttttagtatagatggggtttcactgtgttagccaggatggkcttgatctcctgaccttgtgatccacccgcctcggcttcccaaagtgctgggattagaaacatgagccacctcacccagccacccagctaatttttaaaaatattttttagagacagggtcttgctgtgttgcccagaatggtcttgaacttctggcctcaagtgatcctcccgcctcagcctcctgagttactgggattacaggtgttagtcaccatgcctgagtcctataatcttttaataaacacagaaatctcaagcactgttattcccatgaaaaaccatagaattgcagaattcagagataatctatagcaaataatacactgttccattaactttcagttttttcttcttcttttttttttttttgagacagggtcttgtcctgttgcccaggctggggtgcagtagtgtgaacatggcttactgaagcctttacctcttgggctcaagggatcctcctgcctcaccctcctgagtagctgggactacaggcacatgscaccatgcccagccaattaaaaaatttcttttgtagagacgaggtctcaatatgttgcccaggctagtcttgaactcctgaacttaaggggtccttctgcctcagcctttcaacgtgttgggtttataggtgtgacccaccgtactcagcctactttgagttcttatcgtgaacacaacatgtattatactgagtgaggtttttaaaggacaggttccccttctcccaatcatattctaacctgttaacctagccagatcacttgtctccatgggaggccgtatattccctaactctggaagagatagcttgtgttggaatcctggttccaccacttcctagtttcagcaatgttcctcatttctctaagcttcaacaacgttatatgaaaaaagcaggtagtgataatacctacttcacagaggtgaggtaaggattgagttaatctatgtggcctaattcccagcatgtgcaagcatgcaatacatgttggctacaaaatgcgtgtaccttgaaaacttcttgctcattccctttgtgctcttgttgatgcaattctcatgcttccctgcctccctctaccactaaatggtctccctgtgctcctccctattgcttgtgttttacctgtcatttcaccttcaactcagttgcctcttctttaatagtcttttctaactcctccagtctgtattgacctctgaattcctataggtccttctatgccattttagtaattatattcctatttttatggcatatttctgccttttatggtatttcttcttaactttacatgcaataaaagagttgtggaattaccatctcaatcaagatacagaacagtttcatcattttccccaaaaaatctaccttgggatttgtttttaaacaatttactgggtatacattatttttctacatatacaatttaggttcttgaatttagtattggttttatacaaatttgtcttccctaagtatggcttagtattgcgcatatagtgagtgagtttgtataaaacaaagcctaaaagcatggtaaatttgaatatcttaagaagccactaatttaaattatttaactttggtctttcagggtcattttatttaggtgcaaaatttcaactgaaaattattttggtataacttgttaaaagtggttttggagccttgccagggctaataaaaccgggtgtttgtttgtctttggaaaacaaaaggctttttctttctatttttattactgaatatatacttgtggttttatcattttctttctctctctttttctttcttttctttcttttttttttttttttcctgagattgagtcttgctctgttggccaggctggagtgcagtggcacaatcttgactcactgcaacctctgtcccctgggttcaagcgattctcctgcttcagtctgcccagtagctgggactacaggtgtataccaccatgcctggctaatttttgtgttgttagtagagacggggtttcatcatattggccaggctcgtcttgaactcttcatgtcaagtgatctgcccaccttggcctcccaaagtgctgggattacaggcatgagccacctaaatttttacatgtttcttctcctggatgacatttggttgttatgatattaattactaaatttatttatggaattttgccttttttcttaaacacagtttaatgtaaagcaattcaattaaaaataaattaactacagaatgcaaaatggaaaaccttcctgttttctcagctttatttttccatgggccaattttgctctcctccttgtggaagtctcttttattgtttatttctaaaatcggaggtcaatgcaagtaatagtatttatacttggaaaaaggtggggctgatatggacaagcaaatgatgctgcatgatttccttaatctttgcccttgggtataatggagatccatctccagagagggcaaaatatggctaggatttgcatcccattcagtagactttacttcctaatgaagtgaattgaatttaatcatgtgtgtctttttttcccttccccaacagcttccatgcctatggctgttctaaaattgggccaaatatatccatttcagagaggctttttctgtaaagacaacagcatcaactatccgtaccatgacagtaccgtcacatccactgtcctcatcctagtgggggttggcttgcccrtttcctctgtaagtaaattaataagtaggtagtgatgggtttgttgtgctggaggttggatgaagcatggagttggggcgggggtaaatccacagtactgtcttcaccagtgttgatatggtgaatgattgcttgaggaatatacccactgttttagtccagaggcagtgtttctccagttaaaggtggatgttacccagaacaacttgatgtcattctgaagaatgatagaatgattatttttgaataggagagtctttttgagtcatttggatcaactcctctcagtaaacaaatgaagaaacttaggtccagacacttgttaaagcccagtaagctatcgtacggcagagctgaaactaagattatgcttgctttatcatactgttaagtggaaattgaggccatgaaaaaggaaaacgtttgcatattaaatttgagaaaacaaactcagcagaaagaccacaaatatatgtgcaaaataaaattatcagaatacattaagatatgtcactattggccaggtgtggtggctcacacctgtaatcccagcactttgggaggccgagatgggctgatcacctgaggtcaggagttcgagaccagcctgaccaacatggagaaacctagtctctactaaaaataaagaattagccgggcgtggtggcgcatgcctgtaatcccagctactcgggaggccgaggcaggagaatcgcttgaacccaggagatggagatttcagtgagccaagatcttgccattgcactccagcctgggcaacaagagcaaaactccatctcaaaaaaaaaaaaaaaaaaaaaaagaaaagaaaagtcactatttcttactttgtactgtccttcagatagttcatcaatttgtaggacaatattggacttcactgttaaataattaaaattttcattctagtttaagattcacaaactaggttaagattgccacttgggatattatgcctactttctttacccttggctctcattcctaaatcttgccattgtcattttatgtgacttggaaatagaagggaaggagcaaggtgaagatttacctccttgagtgtcttggcagtgcagcatatcacaccttatttctcctctggccacctgtcttgttacttgcctttcctagatatatgacttacaaaactttagtgtctcagtaaactcagtagccttgttctgctgtaggactggctggcttttctctctctatttkgcctccaaattggctaagaataataacctagtkgttkgttttttcagcttatgtatctgagttcattttgcctttttgtctggtagatttttttctaatgggctgcagctcagtattttgaaggtgaaggggtccaggattttattatgttctaagaggtataagtattaatatattcatataattctaatttgattatagctacttttatgggagtaaaatgagaaaaatctagcatttagtttaaggggatacttctttttctaagaaatacatcccaccataactggttacttaaattttagttattcagcttaggagaaactgtgtgcagggaagtactgccacttggatgacaatagacggtgtttctgtactatatgaagtactaagtagttgtggtagccatgattctgagcaactgttgccagataaagtttcttttttaagaaaaacttgcccctgtatttgaggagataattgcttgagagtgaataaattaattgtaataataacacatatatatttttgagatggagttttgctcttgtcgcccatgctggagtgcaattgtgtaatcttggctcactgcaatctctgcctcccaggttcaggtgattttcctgccttagcctcctgagtagctgggactataggcgtgcgctgccatgcccagttaatttttgtatttttttttagtagagatggggtttcttcatgttggccaggctggtcttgaactcctgacctcaagcaatctactctgcctcagctcgggttcaagcgattctcctgcctcagcctctcaagtagctggaattacaggtgcctgtcaccacttccagctaatttttgtatttttagtagaaatggggtttcgctgtgttggccacctggcaacatgccccctggcccatgatcttttattaattaaaaaaattattataaagtagaaagagaaaataaatagcccttagttctactacctgaagacaactactggtagcattttgatgtttcctttagtttgacacatttttttkttgttgttgttgtttgtttgttttttatttttatttttttgagatggagtctcactctgttgcctgggctggagtgcagtggcacagtctcgacttagtgcaaccttcgcctcccaggtacaagcaattctcctgccttgacctcccgagtagctgggactacaggcacacacaaccacacctggctaatttttgtatttttagtagagacagggttttaccatgttggccaggctggtcttgaattcctgacctcaggtgatccacctgcctcggcctcccaaagtgctgagattacaggcatgagccaccacacccaatctagtttgacagtttttatatcattatgagcacaccacagatttagttttgtgctttgtttttttacttatctttataacaatttttttttttttagttatagtattataatatcaagcagcttaaatagcaatagggctaaatttttttttttttaaggagtggaaaaagacttagtatcaatctttttatcaatcttagtatcaaactttgattaattcctgtgagtttgctgttaggattgacctggaaaaatattttaatgccaattatttatttatttgtttgttatgagacggagtcttgtcctgttgcccaggctggagtgcagtggcatgatcttggctcactacaactgccgtgcaataccaccacactcggctaattttttgtatttttaatagagacagggtttcaccatgttggtcaggctgttctggaaccctgacctcaggtgatccaccagcctcggcctcccaaagtgctgggattacaggcgtgagccaccacgcccgacctaatgccaatttatttttaattaaagaagtagtatttggccagtttctgggccttaaatgtgcttgaatgtgcaggaaggaattcttgcaaattcttagggtagatttgtttgttttaatagtttgtgtataacatctgttatatatagaaaataatttattttctataaaatgaattatttatgcttaacataactttcatataatgtgccttataatttgatcagaattaagatttggggtgatagaaaatctatattttaaagcagtgatttatttttacaatgcgaggttcataatctttttaagaaatatattatttactgtttcttctttagytatccaaaaaggtgccatattcagaaaactatagatttctgcattatttggcttttacattttttttttttgtttttgggttttaatgatccatattagatttgacaccagacttttttttttccatcatttttggctttgtgtagttctaccttctcccttggtaattcattatacatttacttttataaattcttatatttctagaaaaaggcaagactttttatgtacaaactttcagagtaatgatagtaacaataaagttagtattaaatctcaaatccatatgttgcaatgaataatatactttgtctaaatttaaaaatttgtagtttcaggatagaaaacttacctrtgtttaataggctattttaaatcracttgagtactgactgtaagtagttgcttttcttaagtgatgattactgtatggcataaccttttagcaaaaatacttagcctaaaataacagtatagccaatgtttgtgaccaacttattaaactttttctaaagagtgattgtattacttatggtgacctaaactggaaatgtacatggatgtttgtgaaaagggcttaatcacttttttttttttgaggtggagtctcgctctgtcgcccaagctggagtgcaatggtgcgattttggctcactgcaacctccacctcccgggttcaagcgattctcctgcctcagcctcctaagtagctgggattacaggggtgtgccatcacaccttgctaatttttgtatttttagtagagatggggtttcaccatgttggttaggctggttttaaactcctgacctcgtgatctgcccgcctcggcctcccaaagtgttgggattacaggcgtgagccacggcgcccgaccaaggcttaatcactttatatattttatgttattttattgtattttttgagatggagtctggctctgttgcccaggctggagtatagtggtgtgatctcagctcactgcaacctccgcctcctgggttcaagtgattctcctgcctcagccttccaagtagctgggactacaggcgtgtgccaccacaactggctaattttttgtatttttagtagagatggggtttcaccatgttggccaggctggtcttgaactcctgacctcaagcaatccacccacctcggcctcccaaagtgctgagattacaggtgtgaaccaccacatccagccactttatatattttataacttagtgaaaaacagatgactacctcaaagaaaaatggggaaagggcatgactagaaagctgtcagtggaagaaaattgccaagaaatataaagaaatgctttaacatttaacatttcttaagactaagtcttaagaaatcaaagtttatattaaagcaacactgagaacacagtttggcctgtcacagtagcaaaggtaagaactttcccagcttatcaagcatagaaaacaggtgttctcatacacaaatctggcaggggtataaattggcattaaaaagagtatattgttgaacctataaattatactggaaggaatttatcctggaaataaaagtttcatatagagaattagttggaagacagctgattacagtactttttatagaagaaaattggaaataagtaagttcagctgtaggggactgttttatgatttattctagtgatgaaatattatgatatttcataatttttgataatattgacatagaaagatttttgtaatatattgagagggagaagaatagtcatcgttctttctgaatagtgggattattagtatatgagatattttcatttggtctcttatattttctgtttttcccctcccttgaacattgttttttcaaataaggaagcctatttttattttttaaaaacccattagaaatttttctgttttcattttcatatacctgaagtttaaatgccttaactatatacccatttttacatagcattgtggaagcttaactgttatgtgtgtggattttgtctgtttctaagaaagtgccaaaagaaaaaaaaagatcaaaataactatgttttgagatttcacagtaaatcaaacttcactccttgtcctgtggctcagcagtctaygtagctgactaggctttttagaagtgattggttgtccgttaacctgagtggatctacacatacccatgtaactccttgaatgtggaaagtttgtcttttgtgttgcagcatgctgtaattcaattctgacactaaccacctggagttagcatgagactccacggatttaaggtcattgtccccaataagactgctttcactgtagttttcaggtgcaaatttgaagttccccaggctgcaactctgggggttcctgtgactctgtcaggttcagtaataggctaaaacaactcatagagctcaggaaatcattttacttatgattatagttttattataaagaatcagaatgagccaaattaagatacacagtcaaagtctcagggtggggggcagcctgaatgtagaacttttctgtcctctcccaatgtcatcaagatgtgtcacttttctggcacattgatatgttcaccaaccaggcagctcctccaaccttcagtgtccattgtttttattagagttttattatgtagtcatgattgattgaatcattggccaagcaattgaacttgatctctagttcccctcacctacctggaggttgagctggtttaaagccctgtccccctaatcacatggttagtgtgaccagcccccatcctgagtcattcattagcataaacccaggtgtgaaccaaggggctcaagaataacaaagaccctcctattactcaggaaattgtaaggttttcgagtctctctcccagggacaaaggccacattctttgttatagaccccagtctctgtattttttactctatagccttggtaccttgaaagtgtttaaagcactcagttgttggtttgatacaatttaatattttttaaaaaagttttcgttgtttcctttgaatctgccaacccaagtttacttaggagttggaaactttccatctaatatgggtttctattgttgaaaaaaattattctgatacttgttaaaatggtaaggaaaactttactcaagactattgcacctagtgcaatagcggagggctcaactctractacaacaaggagaagggggtggatttatgggtgaggggaatcagtggatggaaaatcacgaagaggagacatcaaaggtaggagattcttgttaaggcaggccaaagatttatgtatcaaaggtgggagatgaggaatttaatcatatatcaaggatgaggggcttcttgcttagctgacttagcaggacttttgctaagactgggcatgtcctgtccttgcacaccatgcaaggacaggctgacatgaaaggccaaggttgaggcctagttgagaagagggttcacagctggttaactaatgtttagtcaactaaagagcctttgtcactgtctattaatgatgaactttatcttaagcgtgcattgcatagtgagttagtagctcatcgtagaagaacatctatgtaaacatatcttaatatgcaaaaaacctttgttctaggttaattcagaaatatgcattatttaaaatcccattatatctccatttaatagaccaagtattggtctattaaaattcctttactctgggatggggattgttatagtttttggttggagatttttgtaaagtcattctaagtgtaaaaaatacagaaatggaaatagcctctcaacccaaaatttctaataatgtagttttttttttttttttttgagacagtctccctttgtcacccaggctagagtgcagtggtatgatattggctcactgcaacctctgcctcctgggtttaagcaattcttgtgcctcagcttcccgagtagctgggattacaggcatgtgccaccatgcctggctaatttttgtatttttaatagagacggagtttcactacattggccaggctggtcttgaactcctgacctcatgtgatctgcccacctcagcctccccaaagttctgggattacaggcatgagccgctgcacctagcctcgaataatgtactttgaattatccttttcaactgatgttgtttgtgtgttagcataatgaaaaatgtctagcttttgtataccattaagcacttgtatttttctggcattgattaatcagattttcactataaatattactagtgtaataatatattaagtagacaatattcacaattttaaaggataaaatacgactttttaagaaatattaagaaatattttttattaattttggtagtctaagtgctcctaagttaattttaaaaaatcacttttactccctttgttaacacctgggggaagtaacacaggatacattttttgggttgaattgttgtggaataccacatttgaaaagtttgggatttgataatgttttggaagatgagggagattatttactatatatatgtggattttctgaagttctttgtttttggtacattgwttgaaaaaataatatttttttagagaagctgcccacaaagcaggtaactgaggtataatttttattattttgaatagcttacttaaatggtaataagaaattgctagtcttgaggaagaaagaatgagtgggttaataagtttatttttataaagtgtaaagtactatataagtaaagtgttcttatggcgaagtggctttagaattttaccctgcatagcagaggagattggagttggttaggttttatggcaaggcacatctctcttgctgtccttttcctgtactggttcaggaagctggtatccaaacagtctattgctcacatttgtttgtcatttctcccttgttttcatggggacataggcgctgtgctgccatttcttattttcacctctataggcagtaagacaataatcttcactagagtaggaatggtctgtattgctcaccattgtaaccttagtggcatgtaataggtgtttaataacttgaggtagaaaattttatgaaaaactacaaaatgttaaatagaataagattgttgtttatgtttgataatgactactaccatgaaaattcagcttaactctgtggaaactgaccatatttccaagtcatctcttgctatcagatacctcattaaaacagtttttcgggggtgaggggggacaaaggagacttacattgaatgcgtatcctgactggagatgtgtgtgtgtgtgtgtgtgtgtctgtgtgtgtatatactatatactatatatatatgtatgagatatgtatatctccaaagggggaaatataaatatataaaatttaaatataatacttaaatataatatttaaatataaatatataattatatttatatttccccctttggatgtatcttatataaataaatatatatttatagatcttataaaaataaaaataaaaatatatatatgtatttccctctttggagatatcttaaaatatggaggaaacgtctattagaattgtagaaatatagtactgtggagattggtttcttaggttggaaaaaagttttattttcttgtttacttattctcatgtgtagctgcatttcctatccacagcattgtggaaagtactgattctcaattcttatgagcaattttattaacaaaatagtaatagctccattatttgacagtctgacctatatgtctgggttcttcaggcttctagcctacatccacattcttctctacttgttcaggcattaagagaagaatgtatttcctgaaatatttcacaagtggacacagttctttctattccgtgggtcttttggtctgcctatggggtctttttttcttccaaactattgaggtrgtacttgatctcacagtaaatcccaaggcacctgccatctgtgtgtcaggatttctcagactgttgccagctgctgtcatccccaaggcagtgtatcccttagtgatttgctactgtggtctctaaagttgcatgccactctctcttgggcatctggtatgttttagattcgtacaatggaatactgttcagcaacaaaaaggaacaatatatccatggtgctatataggtgatccttaaaacattattttgtgaaggcagwtttgtaattttcgctaatattagaagagttcccttcacatgtaaaagagtttttaaccagtttcccagatttgctggataccccagcaccaatatttctaamtraaactgttagtatttgtattatggttccaagatcctgagcatttgtgcaagaggaagttaaagaagatgtggtgtgaccatgttcttatgttgtcctttcctgtctctaataaaggacggcgaagtgttcttgtggtatttggtttgtggaagcagtaagttaccatatcacatactctgtcttgaaccattataaatattcactggtaaaatatagaaagttgtgtttatttatagctgagtatgagtttactatgcagagaacctgagtcatgggctgactagtgaatgtatcaaaaagcggaatgtgggaatgtaaaagggtgcaacaactttggaaaacagtttggcaatttcttaaaaagttaagcatcaacttaccatatgacctagcaatcccacttgtaggtatctacccattagaaatgaaaacatatctacaaaaatacttgtatatgaatgttcataggattaatcataatagcacaaaactggaagcaatctaaatgtccattaactggtgagtgggtaaaccaaatgtggtatatacatacaactgaatactattcattaataaaaaggaacaaaatgcatgctgtaacacagatgaacctcgaaaacattatgctgagtgataaaagccacatataaaatactacatattgtataattccatttatatgaaatgtctagaaaaggcaaatttgtgtagagacagatagcagatgagtggttgcctgggtttcttggtggaagcagggattaaatgcaaatgggctcaagggaatttggggggtaatgaaaatattctaaaactagattgtggtgatgttgcatagctatataaatttaccaaaaccattgaattatatrtatacttagaatggatgaatgttatggtatgtaaattatacctcaatttaaaaaaagggagcatgaaaatgaattttgccagctcaagtaataagaaacagtgtttgacaagggtagtcatttgagaaatgatgaaagagatttagagatataatctttcaggtgaaaggaaaagggttttgacttgatttgataaacgaagaaagggaactctttcacttttgccttaatcttcagtaaatgtcaaagttaacatcaagtatctatttaaatgtttgcatttctccacacttttgtacactgtgtctggtgaagtaagttgatggtgtgcactaacccttttggaatagtttatcaaggatttaatgtttgtatcttttaattccacatacatatatatcttaaggaaataactagaaatgcaaacaagaatttgtattcagaaatgttcactatagcatcacatagggtaatcaaaaaattaaaaataacctacatgctctcaaagtaggaggaatggttaaattatagttgattttgctttgtctctcttggtttcaaggagtagaaattctaactagattaagtaaaattgggctttgttgaaaagggtaaaaggtgctctaataaccccaaacagcaagatcactgaggccttttggcagtggggagccagagctactttcccatttcacccgttcagggaccaggctagtcactgcttcttcctctgtagacctgctttgttctcagcttcttcttcagccagtcttccttgtacatggctcagtgttgtttgccaccttggacttactcagtttttgttaaaattcacatatttccagaacaggaatctgaaagagctgttctttttgagccttaggtgggtcagtgaacaacctgtggtttggtctttttcttcatccccttccaggggtctgtatttaggtttagatagytagtgaaaatgaaatggcactgggtaatgacattgattcaatacatcttggctaggcacactggctcacgcctataatcccagcactttgggagactraggcaggtggatcacctgaggtcaggggtttgagactagcctggccaacatggtgaaaccccatctctactaataatacaaaaaaactagctgggcatggtagtgcacacctgtaatctcagctactctggaggctgaggcaggagaatcgcttgaacccggaaggtggaggttgcagtgagccgagattgcaccattgcactccagcctgggcagcaacagtgaaactctgtctcaaaaaaaaaaaaaaaaaatctcataggcttatacgaggaatggcaaatattggccattatttattatcaatttaaaaatatttctaaggcctttggtggtggcagcctcttttcttgattctctcaacagaatagtgtacatttgtggtagattcatgcttattttcttatatttccttaccaaaacttgaagtcaggatattaccctttcttattaaaacctcttttactaagactggcaattgaaatcccattggatgccatattgggcactgtggaccaatctccacctcctgtatgccctctctttctgatgtggccacggtgaggtcactgtctcctgacctgcccttaccccactcatgtctgccttagtggatcttcttcctctcctcatcttcctctgctgttgctctgtgcctcatcctccacttcttttctctctgtatacatcctgtacagtgttttgtacctctgtgactttagagaccctttctatccccaaatctctgtctctgtcctagaccccttctgctgagatggagtctctcataactactggcttatcgaatatcacactcagagatatcaccaactctccttttctttcgaacattcagaattttttgtacctcagtttattctctgctataattatgtactgtgccttattcaatttgtattcctggtagcacctagcrgaattccttgcacagtgggtttacttagtatttgcccacatgaatatttttattttttaaaatgggctattatcctttgtatggggttttattttgttcccctactatcctgaaaaatacccacaaactttttttctaaatctaagaatagtttctaacatggtttttgtggtcaggggggaacaaaaccccttaatattaatggacatacatgttaatagcatttctaaatacatttgggcatgtgtattagggcctatatgttttctctgagaataaggacacacagcctagtgagttttggactcgaatcctattatatgtgaattttctttctttctttctttctttttttttttttaagacagagtgtcactctgtcacccaggctggagtgscatggcacaatctcggctcactgcaacctctacctcctgggttcaagtgattctcctgcctcagcctcctaagtagccgggactacaggtgcatgccaccacacctgtgaatttaatttctwtactaaatatactattccaaaagaaagaaatgtttattggaaaatgcaaccaattcagaaatatgctttgtagacagtgaaagtttcaattattttgtatagactaaattagattatagaggttctttggctgggcactatggctcatgcctgtaatctcaacactttgggaggctgagctgggtggattacttgaggtcaggagtttgagaccagcctggccaacatggcagaacccttctctattaaaaatacaaaaattagctgggcgtggtggtgggtgcctgtagtcctggctacttgggaggttaaggcaggataattgcttgagtcctggaagtggagtgtgcagtgagccgagactgtgtcactgcaccccagcatgggcaacagagcaagacaccatctcaaaaaaaaaaaaaaaaagaaaagaaaaaagaagtagtggttctttttatgtacaaaataaatttgctcattgggttagagtatggttattgattagggggctaagcatttagttactgcatggggcagccaataataaaatcacagccctgtgtatttacctccacagtgtgtgctgataagtgcaaaaggtttgtgcaaattcttttgaagttatattgtaaccatggtatatgtattgaaaacttggccattttaccccattcctatgaatgaaaactatttggtgaatcagaggatagtctgaattgggatatgaaggccagtataagtgtcagttagcaaagtcagctctagtttagtttttttttttttttcttttaaggcgtagcattactagaagtatagctttgggaaccttgtagcatcttaaagacttttaaagggttgacagctattggcaaattgactaatacagagaactaaactttggttcatgtattcaatgtctaaatgaaaaatgggaagataaaagagctaagaatgaaatgtgatttcatgtgcttctcctttttagctcttataatagattgaacagatttgatatttgtggtaaatmcactcaggcagagtgacagaggcttggttgtcatttagcctttagggycttagtggagttaatgagaactgcaaatggtcatcaagtcttggtgcttcatggagaagcaacacttttacagtgagtgtgttagcttagtggttatggtattactgcagggacatggatcacttagggagagagcgtttcaggcttgggtcagtcttaaagcagatctcatgtggagggtttctgctaacctgcatctcttacaacacagtactagtcagtatgctgtagtattaatcagtaggtcaagttcagtgaagtaaaggagaattgaattcttgaagttcacatttaggcaaaaatttggcgttttaggaggtgagtataagacatgatctttatagaaaacgctgatgataaaaacagcgctctctgttaggtgcytttatgcttgactccattgtcatcttttcttaagaaactaagctcaggactgggtgcaatggctcatgtctgtaatcccagcactttgggaggctgaggctataggatcagttgagctcaggagttcaagatcagcctgggcaacatagctagacctcgtctctactaaaaaacaaacaaacaaaaaacaaaaaaaamcccccaaaaaaaccaacaaaccagcttggcatggtggtgcgtgcctgtggtcccagctgctcaagaagctgaagcgggaggatagcttgagcccaggagatcaaggctgcacttagctatgatcgcaccatcgcactctagcctgggtaacagaatgagaccctgtctcaaaaaaaaaaaaaaaaagaaactttaagttcagattcctttttatagcagctttcagcctgctatagacaatacagaaatgagtggataaagttttatttagatactctgatagcttagccagtgacaatgacctatccaaatatggaatgctaaaatgttttctttttggaagcaaagcccatgaaaaattggtttggaagtagcgttaaaaacctggtgattaaatgacaacaagaacgtgagaagagatttttccaaaatccatttagtgtgtttggacagaaacaaaggaaagataactctttgttaaattggttaatagaggatttgaacactttgtttgctgtagacaaaacatctttatcttaaaactgtaatctttctaacttccgttgcatgcattgctgcatttccttttttacatgtgctctcatttattttcayggcaaatgcatttttagacagagtctgtgggataattattgccattaattagttttgatatttcttttttaatgatattttcatttattcccttttgctagctggattgccttttgcaattcttacttcaaggcatacccccttccaacgaggagtattctgtaatgatgagtccatcaagtacccttacaaagaagacaccataccttatgcgttattaggtggaataatcattccattcagtattatcgttgtaagttaaatccacttttccaagtttataacttttgggcacttggcttaattttctgttactcttttaatgcttaaatgtgtaatcctccaaaaacaatgtatgctttttaaacctttaattgatgctttatttgatcaagagaatctcagctattttaagtggagtcaaaaaataacaatgtgtaattgtaagagccaggcatggtgacatgcctgtagtcccagctactcgagaggctgaggctagaggattgcttgagtctcggagttggatactataatatgtgatgatcacatctgtgaatagccattatactccagcccagacaacactgcaacatcccatcttaaaaaaaaacagaaaaaaaacacgaaaagaaccttgctggctatgtatagattttatgctaatcttttccatgtcactgtgattgttagagctctaattttattgttttaataatcttgtgatcaatagttgaatgttatagcaatatgattctagcatactttatacataggatatcattttataatttattgtatctgtatgtatgtacctaccgtttttgattctccctctgtactgagttctagaaaagaaaaattttgctaagtgatgttaaaacttcaatgcacgcttactttaaataatttttagatcatatcatacacaggagagaaaagctatagttctatatatgattagtagtgaatatgaaagaatttttactggtactgaatgcaagagtgagtcttaaactaaaatagtaactgttgttttccggtatttcaggtggaaatgcttaaagaatgtgtctagggataagactattgactggactacatgatttttataatctctactaaaattctgtaacttaacagttttgtgctccatagcttgtaatattatggttccagcatgcttccactgcatggctctgctgaccataacttgtgactttataaacaagatttatgttagttaaaagtagaaggctgggtgcaatgactcatgcctgtaatcccagcactttgggaggccgaggcaggcagatcacctgagatcaggagttcgagaccagcctggccaacctggtgaaaccccgtctctactaaaaatacaaaaattagctgggtgtggtggcacacacctgtaatcccagctactcaggatgctgaggcaggagaatcgcttgaacctaggaggcagaggttgcagtgagccgagattgcaccactgtactccagcctggttgacacaatgagactccgtctggaaaaaaaaaaaaaaaacaaaaacaaaaacaaacaaacaaaaaaaccagaaaatatggtggatgtggtggctcacgcctgtaatcccagcatttgggaggccaagtcaggaggatcacttgagccctgaagtattgagaccaacctgggtagcatagcaagacccctgcctatatccatccccctcctcgcaaaaaaaaggccaggtatggtgggcaggagcctctggtcccagctactcagaaggctgaagcaggaggatcctttcagctcaggaagttgagcctgcagtgagccatgattgcaccacggcattccagcttgggcaacagagtgagaccctctctcaaacacacagacacacacacacagatttttttttttaattaaaaaatatatatagttgtatccaggagataggccaaagatgayagcatgtatatcatgtctgtttttggagtttattttaaaaaaagaaaagcttcttaatttagaaatgtcttaagaatgatcgtaataccttattagcattgaaagttaacttgtaatttgtggtgcataattaataaaagaaaacctttgtatatagatatttgttttataagactgtgagctccttgaaggcagagatgatatcttgttcatcyttgtgtccacygcctggcatggagcccagcatgtcctaggtgcctgaatgaaactgtatgaaggaaactatagagtaattacgcagtaatgttggtgactctcccaaagtacggggaagttttaggaaatcaggtattcttttaatctaaacaaatctttacactgaattttttctgctagaagaaagccaagtctataattcttccattaaggagggagtagggtctttttttaaaaagtatgtatgtttctgagtgattgctaagcaattaaatataacatttttagtaggacttttagttgcaaatagccaatttcagacaggattcaaatattcaaataaacagtgctagaaatagacctgtctttcaattctgccttgttttttggtgtcagtaaaaaggatgccatgctagcagaactacaggaatttgctctagcctggagggctgcagtagagcaggacactgattgctgggcactgtgttgatgtgcacggcctacacrgggcctgacaaaatgcttagttagcaaaaactcatgaattatatttcattaacttgaaattcttttctatttcttttcttcttcttcttcttcctcttcctcttcttcttcctcttcctcctcttcctcttctctctctctttctctttttctctctctttctgtctttatctctctctttctgtcttctctctctctttctttctttctctctctctgtctctttctttcctttgtttcttttctttctttcttctttcacagtctccctgtgttgcccaggctggagtgcactggcgcgatctcagctcactgcaaactccgactcctgggttcaagcgattctcttgcctcagcctcccacatagctgggattacaggtgcctgtcaccacatcagctaatttttgtatttttagtaaagatggggtttcactatgttggccaggatggtcttgagctccttacctcgtgatccacctgcctcagcctcccaaagtgctgggattataggtgtgagccactgcgcccggcctatactctactgtctcaacataacctgtgagaaagttatctttacatttaataaaatggcaagcaaattaatagatgaatgcagactgctttaaaaagaacagattgtttaaaggtattgttttcatctctacagtatcactgaaaacaaacactgcttagggcagtggttttatgtatgtatgttttgattaattgattgacagagtctttctctgtcacccaggcttggagtgcagtggtgtgatcagagctcactgcagcctcaacctcctgggtttaagtgattctcctgcttcagccacctgaggagctgggaccacaggtgtgcaccaccacatctggctaattacattttttttttaaagagataactatctctctgtgttgtgcaggcttgtgtctcaaactcctgggctcaagcagccctcctgcctcaacatcccaaagtgctgggattataggtgtaagccaccatgctcagccttatgtgctcatttaaaataattcaattttattcattaactcagcctctttcaggcaatgctcggttagacttgtatacatttaactttatttactagaaagtaaatcatttatttaaaaaaatccctgtgattaagactgcataccagggccttgacatgagttgcaaatgattgattaataaatgagtgattgagggagctggcaggtagagaaccagcattattatagtttctgagaagacatgagataatttcaatgaggaggaaatggtcagtgaagtcaaatacactgagaagttaaagtaagtgagagttgataaaaatctgtttgatctggctgagtgcagtggctcacacctgtaatcccagcactttgggaggccaaggcgggtggatcacaaagtcaggagttcgagaccaccctggtcaagacggtgaaactccttctctactaaaaatacaaaatttagctgggtgcggtggtgggtgcctgtaatcctggctacacaggaggctgaagcaggagaatcacttgaacctgggaggcggaggttgcagtgagccgagatcacgccgctgcactctagcctgggcgacagagcaagactccgtctcaaaaaaaaaaaaaaaaatctgatctgatgaaacaattttgacttttgagaaaaaaatcagtagaataaaggaaatggaagtggttagagatatttaggagggagaagaagatgcggagatgtgtcattgattttagacaattcttttgggaaggtgggccctgaatgaaagacacaaaatcatagggacagtgtagaaacatataaaatgatcttggttgatggagatttaaaggggatgataagagaatactgtgggagataggcttaaaaaggttgaatcactctgatttagataattattagctttgaacttcataagtattgttttactcctccaaacatttttatttctttgataatttatcatatcccagaatctaagtaaataatgcattataaatagtctcagtttaaggattaggccacacttggcttaggtgtaaacttcatgaaaggttaagaattggcataaatggctcaaaggttagggtaaggaattaaaatgaaacaaaagaatatggttatcttgtgtggatcaaatgggcagacacatctctgcatttaattcagaagaattgatttagaacttctttattgtctgcttctctcagcgatgtgagttgacctagcatttgctggctttagagactcccctgcattcccattattaatggttaagtttcagcttacactacttctgaagatcagcttttaatctgtgcccagtattctgaatattcctagcaaactcattttctgtcatcactggcaagagccaggatttgggtggccataaactatgatgattatgactgggaagactcacaaaacatactacctgtttctggaaaatagttcagtgcctaagaacagctcatacctgagatgtggaagtttcaactgctgaaactgtggttgattaatatacttgatatgttttcaagaatcaaagattaattccaaaatgaaatgttagataagttctttctggctgctgatctgtgaggaattactgggaccccttaatggcctaaggaggcaatgtgtactgaaatggaaagggttcctctgttggcagtcagggataaccctaagcaaaactgtaaaggaatgacattcttggaagtacatatagtttacctctcctgtgacctgttctcagaaaagaatctgactaattcattcatgttaaggactataattagaactgtatttttatggggcttaacatgtataaactaagggcatttgctgtttacccaaggcagcacctttcactaaaatttattgaccacctactttgtttaggtcactctggtgatatgaggttttctgttcaacaattaagaaatcctccttaccttgtagagttcatagtctcattgtcaaagttaaaacattctaattatggaactctaggagccattgagccaggtaaggaaaggattttaggtatcagattcttgaaatccctttcgggaagcaaccatttattttacttatggtaagacttactctgaagacagttgatcctcattaaatggaaatgtttgaatgctttataaaatagtttatataaatttaaggtgaagcagagaagctagtaatgtatctcaagtcaagctttgctacttaattctctccacacagattagcaaacccactgttcaggctgctctgtggttaagtggttttttttttttttaatttttattattattttttgagatggggtctcgctgtgtcgcacccaggctggagtgcagtggcgccatctcggctcactgcaaccaccacttcctgggttcaattgattctcccgcctcagtttcccaagtagctggggattataggtgcctaccaccactcctggctaattttttgtatttttagtagagatggggtttcaccatattgkccaggctggtctcgaactcctgacctcaagagattcacctgcctcggcctcccaaagtgctgggattacaggagtgagccacggtgcccggccttaactgtttattttggtttcaggtagctagagtcttactgtcttttttaatagcaaatgttactatttataatgttgccattcagtattctttgaattctcaggatatgggtttgttaacttataaagcattggaaacctttttatacttttaaattagtgactaaaaatcctgtcccaccccttgggaccccagcagaggtcacctggaaggctaaatccctgccctctgtatcctctagcaatcctccctgaaatgattttaytctttttaatatgatggatgtctttgattcaaaggaatatttgagaaaaatgaagcctctgtcagataaaagtacttatacacaggagtttctgattggggaagtaggtatgtatgtatgtatttatttatttattgagacggagtcttgctcttgttgcccaggctggagtacaatggcatgatctcggctcactgcaacctctgcctcccaggttcaagtgattctcctgccttagcctccgaagtagctgggattacaggcacccaccttcatgcctgactgattttttgtatttttagtagagacagggttttaccatgttggccaggctggtctcgaactcctgaccttgggtgatccacctccctcgggctcccaaagtgctgggattacaggcatgagccaccacaccyggctggaagtttgttttttggacaagccatagtttttgtcctccaggatatatcactgtctactttttaaagctctgtttatttgaatacaagaaaaaaaaaataagatcttgttattttaggtaagtgatgatataattttgtcccagccatggctttgtaagtaatgtccaccattgatatgacacctgttttgtggtttagaattggatatcctaagttgactctccattgtaaagaaaaaaggggctgggactgtttttgaaacaaagatatttttgcgatttaccatttccttttttccccctatgttttgttttgtttaaagtgcctgcttgctactttaacatgttatttttctgtttctttttcagattattcttggagaaaccctgtctgtttactgtaaccttttgcactcaaattcctttatcaggaataactacatagccactatttacaaagccattggaacctttttatttggtgcagctgctagtcagtccctgactgacattgccaagtattcaataggcagactgcggcctcacttcttggatgtttgtgatccagattggtcaaaaatcaactgcagcgatggttacattgaatactacatatgtcgagggaatgcagaaagagttaaggaaggcaggtgagtgttaaatcgctaatgcttgtttaatcttgtatattcttggaatagaaggtttcagtgactggaagataagccacgcacttaaaaagagaagttagtgttatcactgggaggtgaattttgatcttgtatgaattgttctctctcatcatgcctttttccttttttattgctgtcttccatttaaaagtgttttattgcagctctttttttcatcgccagcatgtaagaatgttaaatgaaccttatagatcatttaggctagagtcagcaaactttcttaagatgccagataacatatataatatatataatttttttttttttacatttttatattattattttgtagagactaagtctcactatgttgcytaggctggtgtcaaactcctgggctcaagtgrtccttccacyttggcctcccaaagtgctggggtaacaggcatgagccaccacacccagccaatagtaaatattttaggctctctgggccatatagtctctttcacaactatggaactgtgctgttaatagcaagaaagcagccatagacaatacttaaatgaataatgtggctatgttccaataaacttcacaaaaacagcgctgccacaggggtcatagtttgccgaaccctgatctagtcccaccattatttatgaagctctgctagatcttagtattcttagtttattattattgtttagatttttttttataaggtaacttggttcaggttgtgacagctctaggtcatcaggttgctgtcttataacgcccttattgggctcctttctgcatgctgggacacctttagacatgaatgaaacagaatgtttagaactcagaagatccaactttttaaattgatagatgaggaaaaaatagaggaccaagaacactaagtaaagccactaattagtagcagagccaattcctcatttcaagtttcaaaattgtcagccttatctttttatatatcaagtttaatttcctttagttgttcaaagtacaaatactttcttgggtaaaacatcctttgtttgatttttttagatatgatttctagatacttcattgtctttgttggtattcttgaaagcaacgtgggcctgctaatagcttcaattttttttttcttttcctttttttcttttttttgagatggagtcttgctctgttacccaggctggagtgcagtggcatgatcttggctcactgcagcctctgcctcccgggttcaagcgattctcctgcctcagcctcccgagtagctggsactacaggcacgtgccaccatgccctactaatttttgtatttttagtagagacggggttttaccatgttttccaggctggtctcaaactcctgacctcaggtgatccgcctgcctcaggttcccagagtgctgggattataggcatgagccatggcacccggccagtagcttcaattttttgtatttagtggggatgaaaaaaatcttatttaactagagtatatactatggtatttgcttggggtttagcagtgaacaagacatctctggtccccatcttcatggaccttagtctggcagggaagatttacattaaacaaaggatgagaatggaagagaacttgcttggtgataatgaggtcaaagaagagaaagatcaagctgttaaatggcaaactttgaggtggtgaggaggactgatatgggtgtaaagtcttaatgaaggagggaaaagtgactgaagaggtagacagttgagaaatagttggtaaaaggtgatagtgttgatttgagctcargtgaacaagcatttttataaggggctagaggaagaatggtccagaaatggctttgaggaatgatgaaaacaccaacatcaatactggactcttaaggtgtatgggctgtgtagatctcattccctgcaagggcaagcagtatcctagggaaagcctctttaattggatggctaggaggtacagagagccttcagggaacagtttggagacacagggaaagatagaagactttaacagtagagccagaattccagagtgttcagtggaggagtaggaacagaggggatgaacaaatggcttgggtggaggagaggaagcctattgaaaatgagactgaaatttaaaacaaattataaagaagaacaaatagctgggtaaaaacataccatgtaaaacaaaatctgatacaagcttatccaacctgtggcccacatgtggcccaggatggctttgaatgcggcccaacacaaattcgtaaactttcttaaaacattatgatttttgtttgtttgtttattatcagatattgttagtgtattttatgtgtggccgaagacagttcttcttccagtgtggtgcggggaagccaaaagattggacgccccgatttaatagaataaaattatcatgatttcttcttccatctataacttaaccatataacctttaaaaaataccatacatatttatgaatgcaatgataaaaccagctataggagtacggctggcgtggtggctcatgcctgcaatctcagcactttgggaggcagaggcaggcagatcactcgaggtcaggagttcaagaccagcctggccaacatggtgaaaccctgtctctactaaaaatacaaaaagtagctgggcatggtggccgcacacctgtaatcccagctacttgggaggctgaggcaggagaatcgcttgaaccccggaggcagaggttgcagtgagcagagattgcgccactgcactccagcctgtgtaacaggatgagactctgtctcaaaaaaaaaaaaaccacctccgccccacataaaaaaacacttataggatttaaatcacaaaggaaaaaaatagaatagatactagtcgaactactcttttaaatagcttttttgaggtataattcacatgacataaaattttgcccattttaagtgtacaattgaataaatttgtaaagttatttaccattacagtcaagttttcagatatttgaaaagcttgtccctgagtgtttacagtcaatttacactcccatctgcaaccggagggtcaagtttctgtgcctatagttttgtgttttctagagtattatataaaaggaatcctacagtgagtactttgttgtgtctgccttctttcacttaacatgttagttttgcaattcatccatgttgttcctttttctccccctgaggtatattcgattgtatggatataacacagtttacttatccattcatgcaaatattgatggacatttgagttgtctccaatttttggctattaaaaataaagctgttctggctgggtatggtggctcacacctgtaatgtccgaactttgggaggccaaggctgggtggatcacttgaggtcaggatttcgagaccagcctggccaacgtagtgaaaccccatctctactaaaaataacagaaattagcgaggtgtggtggtgcacacctgtaatcccagctacttgggaggctgagaaactgaggcacaagaatcactttgaacccgtgtggtggaggttgcagttagcccagatcatgccagcctgggtgacagaacaagactgcttcttaaaaaaaaaaaaaaaaaagatgttctgaacatttgtgtaccagtacagtaatatatacttttattttttcttgaacaaatatctaggagtagaagtgctggactatatatagcatgtgtgtatttattaatggccagtttttgttattttagccattctaagggtttttgttatggtatctcagtgtggttttaatttatatttccttaatgaccagtgttgctgaacatcttttcgtgtgtttcttgtccattcagctattgtcatttttgaaatgttaactcttttacccattaaaaaaaaattagttgcttgtctgagttgtaagagttctttatatattctgaataaaagtcctttgttagatatatgttttgaaaatattttctctcaatctgtggcttgctatgtattttcttatttatttatttatttatttatttatttatttatttatttatttatttatgggacagggtcttgctttgttgtccaggctgtttttgaactcctgtgttcaagcgatcctcttgcctcggccttccaaagtcaaagtgctgggattataaacatgagccaccatgcccaatcarctttttcttttctttttttttgagacagagcctcactctgtcgccgaagctagagtgctgtggcacaatctcggctcactgcaacctcatgcctcagcgtcttgagtagctgggattacaggtgtgtgccaccatgcccagctaatttttgtatttttagtagagatgagtttcaccatgttggccaggctggtcttgaattcctgacctcaagtgatctactcgcctcagcctcccaaagtgctagggttacacgcgtgagccaccgctcctggcccaactttttattttctttttcttttttatcttaatttaagttctaggatacatgtgcagaacatgcaggtttgttacataggtatatatgtgccatggtggtttgctgcacctatcaacccgtcatctagtttttaagccccacatgcattaggtgtttgtcctaatgctctccccacgccttaccccacaccccctgacaggccccggtgtgtgatgtttccctccctctgtccatgtgttctcattgttcaactcccacttaggaatgagaacatgtgcgtttggttttctgttcctgtgttrgtttgctgagaatgatggtttccagcttcatgcgtgtccctgcaaaagacatgaactcattcttttttatggctgctttctttttctttttcttttttttttgagatggagtctcgctgtatcccccaggctggagtgcagtggcacgatcttggctctctgcaagcttcgcctcccgggttcacgccattctcctgcctgagcctcttgagtagctggatctacaggcacccaccaccatacccagctaattttttgtatttttagtagagatggggtttcaccgtcttagccaggatggtcttgctctccttacctcgtgatccgcccaccttggcctcccaaagtgctgggattataggtgtgagccactgcgcccagctggctgctttattttcttaatggtggtttttcaagcttaaaagttttaaatttgatagaatctaatttatcatttttttcttttatggtttttgctttctgtgtcctaagaaatctttacttgcctcaacgttccaaaatttttcttattttttaaaataagttttatgatttatttgtttagtattgtgatccatttgaattatttttttgtgtataatgtgacaaaaagggtcaatatctactttttctccattgaatatctggttgttccaacattatttattgaccgaaaaaaaacattttcacattgaattatgttggcacttttgttgaaaatgaattgaccacataaatgtgggtctatttctggacacttagtctagttcattgctctgtatgcctctcatgcgaataccatactgcagctttgtaatagttttaaaatgaggtgtaatgggaagcttttaactttgtccttctttttaaagcttgctttgtctattgtaagttctttatgttttctttgaaagggcagaaattttattgagattgcttcaaatatatagatcaatttttgaagaattgccatgttaatattgggtcttccaatccatgaatatgttgtatctctccattaacttaggttttctttagtttctcatgccagtgttttttagttttcagggtctgggtcttgcatacgttttgttaagtatattactaacttaatgccattgtgagttttttttttaatcaatttccaattgttttgagtgtgtagaagtagaatttgtttttatattaatcatgtatcctgcaatcttgctaatttaatttattagttggagtgattttatagattcctgaaggttttttgctttcccattcatgttgtgtgtgaataaagagagctgtacttcttttctcttttatattgccttagatttcttttcctttccttactacactggctaagacctgcaataccaggttgaatgaagtggtgagagcagattgcttgtcttcttcctgaccttaggaaagaagcactcagcctttcacaaatatgtcaactgtgyrtggtttttttttttgtagatgctttttgttagatttttatcatgaatgggtattggattttgtgacatgctttttctgtgtttgttaagatggctatattgtttttcttctttattctctaatatagtatattatgttagttttttgaatatcaaagcaactttttatccctggggtatatacttagtcatggagtattatactttttatattaattggatttggtttgctaatattttattaaggatttttacatctgtgtttatgagttattggtctgtagttttcttgtaaagtttttgtctagctttagtgtcaaaagtttggtattaaatgttgaattcatcagtgaagtcatttgggcctagaagtttctttgtgggaaggttttaagtttaatttaattttttaaaactgagacagggtctcactttgttacctaggctggagtacagtggcgtgatcttggctcactgaaaccttgacctcccggctcaagtgatcttcccaccttagcttcccgagtagctgagactacaggtgtgcgccaccacgcctagctaatttttgttgttgttgtagtattttttgtagagacagggtttcacctgttgcacaggctggtcttgaactccttgtcgcaactgatctgcccaccttggtgcccaaagtgctgggactgcaggcatgagccaccactcctggcctattttttaatgttttaaaaaatatttatattcattcattcatttatttaattaattagagatggagtcttgttctgttgtccaggctggagtgcagtggcccagtcatagcttatggtagccttgaactcctgagctcaagtgatccttctgcctgagactcctacttagctgggactacaggtgcatgccttcaggctcgaataatctttgtgggaaggttttaaatatgatttcaagtttttaaatagatatagaactattcagattatctgtgttttcttctatgagctttggttgtttgtcttttaagggatttgtccatttcatgtaagttgtcaagtttattggcatcaagttgttcatcatgtcattatactatctttgtattgtttgtaggaactgcagagatagcctctcttacattcttactattgataatttgtgtcttatgtctttttttcttgactgatctggctagaaacttatcaattttattaaccttttggttagtttcaagggtttcttttgatttcattgatttttatctattttttgtgttcagtttcatttatttttgcttttatttttatttactttctcctgcctgcttttagttttgtttgcttttcttttttctagtttcataaagtagatgcttagatcactagctgtgtcacaaattttgatatattggatctttatttaactgaaaatatagttgatctttaaacaatgcagggactggggcgctgaccccctgtgcagtcaaaacttcacatataataacttttgactcccccataacttaactacaaatagcctactgtcgactggaagccttaataacgtaaacagtccattaatgcatattttgtatgtcatatttattatatactatcttcttacaatgaagtgtggtagagaaaagaaaatgagaaaaccataatgaagacaaaaatatgtatctgctattcagtaagtggaaatggatcatcctaaaggtctttatcctcattttcttcactgagtaggctgaggaggaggaagaggagaggttggtcttgtctcaggggtgagggaggtagaagggaggcaggaaaggcaggcatgctcaatgtagctgttattgaagaaaatctgcatgtaaatggacctacacagttcaaacctgagttgttcaagggctaacaatactttctaatttcccttgcgtcttcctctttgatctgtggattatgtaggggattttgcatttatctttctgtcatcgatttctaatttaatttcattgtgtttagagaacatactttatatgattagaattctttcaaattagttgattcccatccccctgggcccccacatttttcacatacagtctattctggagaatgttccatgtgcacttgaagagcatgtgttttctgggtgaaatgttctatagaaatcagtttggtcaagttggttgatagtgttactcaaatcttatatatctttactgatttttttttaaccaacatgttttatgagttattttttggggagcttgaaatctctaactataattgttgaattgtctttttgtcctttcatttgcgtaaactttgtttttttatcttgtggccgtgctgttcaatatgtagcacttacaagtgtcgttttttttttctgctgtattgctcctttttggtatcaatgtatttctttgtgtttagaaatattctttgttttaaagtctattttgcctgatattaatatatagtcactctaattctcttatgcttattgtttgggttatatatttttctataagtaaaacttttagcttattcgaatctctgaatttaaagtgtatcttttagagacaatatatagtcatatcttgcttattctttttaatccagactgaaaaatctttgccctttgatcacaaatttaatgtaattaccaatatggctggatttttctgccattttgctatgtgtttttttttttttttttttttttttttttggagacagggtctcctctgttgcccagactggagtgcagtggcataatcttggcccactgcagcctctgcctcctgagttcaagcaattctcccacttcagcctcccgagtagctgggattacaggcatgcgccaccacgcccaattaatttttgcatttttagtagagatggggtttcaccatgttggacagtgtggtcccgaactcctgacttcaggtgatccacccaccttggcctccctaaatgctgggactacaggcgtgagccaccacgcccagccttgctatgtattttctatgtttcgtctctttgttactgttcttcctatactgctttcctttgtatgaaacaatttttttttagtgtagcaatttaagtatcctactgacatgttatctgtttttttggttgtttctctaggggttacaatatacatcttcatatatttaatttttttttttaaggttaatacatgactaagctacaggaaaaaaaagcatatatgtattagtttattatttacttataaccaaatgaagaaaggtgtttattttcagtgatcatagattaacctgggagttaactatcttcttattttctggcataaatatccaagcttttgcatgctgaccatttgttactcattttcatccttttggcattcttgtaacataggcatggacaataatattgtcccacttttatgaataaagaacttgaagcacagtaaggattagcatcttgtttttgattctagaaacttaataaaatggaagtgggacttcagtatcagggtgttgattctctgttttgtacttttccaccaaatgccatgcctatgtctctaatatctctcttggatcaaccaacatgttaataagttaggcaggaaaactctaatcttttctctcagccagcaaatttaagaaagtcattgtggtgatgagtgtacctaaagtctagaaaatgtcattgtaaatgattttttttttttttttgagacagagtctcgctgtgtcacccaggctggagtgcagtggcgtgatcttggctcactgcaacctctgcctcccgggttcaagcgattctcctgcctcagcctcctgagtagctgggactacaggcgccygccaccacgtccagctaatttgtgtatttttagtagagatggggtttcaccatattggccaggctggtctcgaactgctgaccttgtgatctgcccaccttggcctcccagagtgctgggattacaggcgtgagcccccttgcaaattattcatacatatattatttctctggttcaggtacataaatcttattttgttttagctgagaattttcttgtgatatttcttattgatgatatttttgtttcttgcacaagccattttgacaaaatgtgaaatatattgatttaaaatggtataaaaataattattttgtgatatatacatgtcatactcattcactgtctcttcctggtgtatataaattggctgccatatactgttactttgattgcacttttaacctaagtatacttaggctttttacctatttaaaatttctacagccatccatatgcaagtgtccgcttacagtcctgtgtaagggttgggaaagcaccctctttaaaagcagaattaattttggataactgaaattgcagagctatatatgttgaaagtaattattatttatagctttttttttttttttggtctgagatggagtctcactctgtcgcccagcctggagtgcagtggtgtgatctctgctcactgcaacctctgcctcccaagctcaagcagttctcctgcctcagcctgcagagtagctaggattacaggcctgcaccaccctccccgggtaatttttgtatttgtagtagagacggggtttcaccatgttggccaggctggtctcaaactcctgacctcatgatctgcccaccttagcctcccaaagtgctgggattataggcgtgagccactgcaccaggcctgtttatagcttttaagataagctcccttagtaagctttggggttctraagcaaggagcaaggaaaatcaaatatagaaaaagttttagaaagactttgtatcttcctagaaaaatgtaatttccatctgtctttccagaatgagtcagttgttgccaatttcagagctgtataatagtggtacataactgtgggtatgcattgctgttctattgtggagtgtagtttggctggatacatactttcctattatttttctcttgaattttgaaagtcagaaagctaaaaatgcaaaaaatccagtctaaatattgtctatagttttttaggattatagtgtaatctgctcttttaacttatgtatctctacagcctgccaccatataagcttttaattataaaattatgatgcttgacattggggagaaaggaacataagcacccataatgagtcatttttgttgactgtataaatgagtcagagttacatgtaaggatgagaatatcctcctacaattttggtttttgatcttgattttttcccattgactctcttttctccccgccattctctctcttgcacgtagcacacttttgcgctctgtctgctattactgctattataaaccttttactggacttcagttgtagtgaccattaggtcctaaacatagaactaagagcataagtggactttaatagaatacttattaattttaatatctagagttcataatttagaattaatatatgagaatttactgtaaattaaaaggggctatatacttgcaatattagaacatccagttatctaggactgccattattaatgccaatgagaataccattcctctaagattttctggggaaaaaaaaagctaatgagcccaggtagttcacatctgtagctcccttcccaggccaagattctctttagatccatggcccttaaattttaatggttcattagagttatctggagggtttattaaaacacagatttgctgggccacaacctcaagtgcctgattgagaagatttagcatggggcttgagaatttgtatttcttctaacaagtttcagatgctgctcttgatcttggcaccacagcttgagaactactactttagattacctggattatgaaaacatgaccttggatgacatctacttcaggatacaagggtttatatttaccgttaggatgaatttaagggcatacacagctagctagtctatttgttatttttaaaaaattaagacagggtcttgctctgtagcctggcctggagtgcagtggtacgatcacagcgcactacagccttgacctcccgggtgcaaccaatctcccatttcagcctcccgagcagctgggactataggtgcttgttggcacctataggtgctgttggtgtagccaccatgcttggctaatttttgtattttttttgtagagacagggtttcaccatgtttcccaggttggtcttaaacacctgggctcaagcgttctgcctgcctcggtgtcctacagtgccgggattacaggtgtgagccactgtgccgtgcccggcctagctggtctatttgtgatagtacagtatggaaactattggctgcttgaagagatttgctttttttttctttttttctggcttttatttaaattgtgtatgttttagcacaggcccagtgtttctgatccattctgagtaactgatctctggctgtatgaatcagatttaaatacaaaattatttttgtttggattatggaagccttgtattcttcagatgcttacttgcagtatatatgattgaatgtgagaaataaatttcctttcttaaatgcaacccacatgcagataaaataaagctgaagtttgaggaaatgccttctatcataggaaaactcattataactagactggctgggtgtggtacttacgtacctagtacaactggctttacattttgagaaaatggctgaagaagaatatggtctaattgtagacattactgggtaagcatttatgatgctaaaggattcatttgttaaggcttgtatttctcatgcatatgtatgtcagtaactagacagctttttaaatcatatacctgtgtaggaatagcaacatatgaaatgaagaaggggatgatttaaaaagatccttcactttgtgagaggatattattattgtatttaacaggaatgtgacttaaagrtcagtacctctttccagcttccctgttcttaatgtcagtacctgacaatttaggcttgtaggcaaaaagcagtgctacttagtctccagggaatatgtgagtaagaaaaccaataatagcccctgaggagtacagaaatttgctgtaccaaaatggccccagcttcgcctggaccagctaatttactgaccagtaacctattgacctgtctggatcttgatttcctgtgatgtcattctctattgagcagacagacagaaaaagcttttgttgatacagaatttctaatgccactcttctgggagaatgaggtttgcagagacattagataatattatctaataacagtactgttcgtttatataataaacttgggagatataggagggagatataggattggctaacttttatgtttatattatgttaatcaattattttttcttacataatatattgcaactcagaagcaatgttttgcttctggggtaatgtttataaacttttgcatgtgaagatgggcaatttggaagacttttggtttctggaagaacagaaatactcctgtaaaaattgagaaaatcttcacataggcagtgggaaatagaattcagacagcccctaagtcctttcttcttatggtttgtggtttgttattgtgctgcttacgtttgttttgagcatgtttttaagacttgaattttctttttttttgagacagagtcttgctctgttggccagagtggagtgcagtggcatgatctcagctcactgcaacttccacctcctgggttcaagcgattctcctgcctcagcctcctgagaagctgggattataggtgtgtgccactgcacccggctaatttttgtatttttagtagaaatggggtttcaccatgttggacaggttgttctcaaactcctgaactcaggtgatcctccagccttggcctcccaaattgctaggattacaggtgggagccaacggtatccggcctaagacttgaattttaaaaaatttataacaggatacatctgtatttaatcattatgaatattatttactcagttaatctgactgcctttgaccataatggaaaaagaaatttgaggcattttgcacacattattccaatacttgccagatgtgttggggaagatgcattaagttctgcttgtttaagctaatgttctttgacactgcccaagatttctgacaaaagaatgacaagagagggaagttaaactggacttcctaatgctcctcggttttgatgaggaagtccaaatttctaatcactgaaaggggaaaatacatcaggcagtaaggtgtctaaattagataacttagtggcttgatgtaatttattagtatatagcatttaattacatgataaagtatattccttagttttattaatgtatttttataactgtcaaaacataagttgttaaagtatacttcttgtgaagccatttaaactgatactcgatgcatgtgggtgggagagaaggtgaaattgtttatgacatttaaatttgaaaagtgtaaggattatcttggataattaaataaaactttattactcaatagtttagattctactttagcaaaaaaggaaaaaaccacattgaatacctactctatgttcgataatgctgcagggtgttaagagtaygacatgaattaagatgtgatctcaatcagggaggatgggagtttgccagtaatttttcttttgttttggtgtaccttctgatttttaaaaataattaacatatcttatgcaactaaaaatatactgtcaaacctatttaaaacatcttattctacccagcctgcccagcttttgatgtaattggggaagaaggttcagtaacagatgattttaacataacaggttgggctatgattgatatgttaattgagtgctcttcagagaaagggtgatccataaattcaatctagatttttaggaaaggtttcttggaggaaacaggggctgaattgactcttaagtaataattaccaaagagaggtgtggagctgatttcaggcaaaggtgttgaataaacaacatggaacagatatgttgggaactgtaagtagtgtattacactgttttgcattgctataaaggaatatctgagactgggtaattaataaatgaggtttattttggcttatggttctataggctgtgtaagcatggcaccaacatctgcttggcttctggtgagggcctcaggaagtttacagtcatggtggaaggtgaaggaggaaacaggcataccacatggcacatgagcgacagggaaagagaaggtcccagactcttttaaacaaccagatctcatgtgaactgagtgagaactcactcatcaccaaggggatggcactaaaccattcatgagggatccattccagtgatccaatacctcccgctaggccccacctccaacattggggatcacatttcaacatgagatttagaggggatgcccatccaaactatatcaagtagtttgttggcaagtgatggttctggagctgttggggcttaggaagagtgtgtttactctttgctcaacagtttgttctagtgaaggacttgaagcaggagagtaacaagctcatgttttttttcctatacttgtaaaaattattcagctttccactctttaaatatactaaaatgggcacctaaatgttgtacgataagaattggtttcttttctctaacagcagaagggcttgggatactgaaggaaatgtgacttttctgcctttgtctattgggtaagtggctcatgcctataatcccagcactttgggaggccaaggtgggcagatcacgaggtcaggagtttgagaccagcctgaccaacagggtgaaaccccgtctctactacaaatacagaaaattagccaggcatggtggtgcacacctgtaatcccagctactcaggaggctgaggcaggagaactgcctgaacccggaaggcagaggttgcagtgagccgagatcatgccactgcactccagcctgggcgacagagtgagactctgtctcaaaaaaagaaaaaaaaaaaaaaggtttctctaagtgaattattgtggcactgtgttagtcctcctggtaacatgagctgtagtgacatcgtctggttttaatcttaaaggaataggaggtgacctgtctggcagcctcctactgggctctaataattttacatttgtgtgggcttttgccttctcttgccattggtggtgtctccttcaactcaaatctaaatttctgtattggcataatactaaaaacacttttattggtgtcttgagcgttatctttcttttttactatcacgcctgcctaattaaaacaaattttttttgtagagacagggtctcactgtgtagcccaggctgatctcaaactcctgggctcaagtgggcctcccaccttggcctccctaagcactgggattacaggcgtgagctactgcaccagctaaggcttatctttcttgaccctagtcaccaagagtgatgatttcattatctgcaggagggtcataagtggagcctactgccaggttgtagtagatgttcttggccttggtgttgtcttttggagtgagggcttagagtagaagtctcagggtctcgtttctagttagcagtcctgcctcttaaaacaataacaatgcgtactttagaaagtgatttaaaattgtctcttccttctgtattattctgaaagaatttaccttttagcaagggagtcttcttgttcagtgtttttacaaagggggtgggtggtgggcaaggtgttacagttgcctgcaaaggagtgacgcacagtgtatcgttcgtttcatccaccgcttgtcccttgtttcctttttgactgtagttttactgttaggtaaagtggctttggtgatttggagtatttttgtatgaggtcatgaattttccttaataaccaaggaaacttatgatctttccttcccctggttagtagttgtatgtgttttaccctttttgtcagcagccttcgtcacagcctcatctctcctcatctgttacagtagtcaccaagtttccctgctgagagtttggaagcatttctttcccagtcatgttattttcaagatataccgagttctgctttcctttatcttaagattctcagcaacctcctattttctagattcgtttttttgcaagattcttccagaaacagaagacacacatgataacaagttctaaataccctacacacatacctactgtgtcctacatttccccactcttttttcattgtccatgttcctgctagtttctctcctttaaggtttatgacctaatatctgtagatgtcagtcactcggcatgtgattcacagatgttagtggctgtggagtggtatttgaggaattaatgactaaaatagaatagtcacttctgtcttatttcagatgggtatgtgtctctctatgtaatgtggcttggttaaaattgacctatataatagagtagctttaaatggaaatgtattaaaataattgtaaaaataattcaaggagtatatgacaggattttttgctgcaaatgaaacaatttctcactttctaggtggttcaaggaaataagatgagtctatataattttttgttatattatattttagttaattttggtggggaccgttttatattcctttaccatttattaccttcatctctgtaccctttgggagaggtaccctgtgtttcttatagttctagacatttctagaaatgtgatttctttaaaaagcctccccttcctaaacattcagtatttaagtatatttattagctgcattagttataaaaatggcagagttaatttactgaatttcagggtatcaaacatttgaagaaacatttgaagaaaatgcctcatgttgtaatttgacttccttttaaattatatgtatattgtatatttttattggaaacacaacatgcggtatttataaatacatatatatgttaaaacattttaactgcaagatgtgagaacagggcccgattcaytgctgggttctgggcatgagtttgtaggtagggagctgtgtttatactcggagtagtggcacttttagccaagaaactcttggggaaactattaggaagagaaatgtagactgtgtgtgtgtatttggcggggaagagatttgtaagaaatctgtagcaggcatgtcagatattttgacaaccattactttaaaatattgtcacatatatattatcccttttacatcaagttgtgtttccagtattatcaccgtgttatgtgaaagtttagtttaacccccatttgatacctttccctggagctgctgttaatagtttgtatttcctttcagtcattttgctatgtatttttatattgaatgtgaaattgtatagtttgtgtggattaaataagtaacatttaaaatatgtcttggagacacagcttgtatcagttcacatagagctattcattttagttaatatgttgtacaatcagttctccatatctgtggattcaactaactgtggattgaaaatacttgtgaaaaaaattgcatctgtactgaacgtatacagacttttttcttgccattattccctaagcaatacagkaggacaactatttacatagcatttacattgtattaggtattggaggtaatctagagatgatttaaagtatatgggataatgtgtgtaggttatatgcaaatactgtgtcattttatatcagggacttgagcatccatggattttggtatccttggaaggtccaggaaccagttccccacagataccatggggcgacagtattcagaataatgctagtagaatcggccgggtgcggaggctcatgcctgtaatcccaacactctgggaggctgaggtgggtggatcacctgaggtcaggagtttgagaccagcctggccagcatggtgaaactccatctctacaaaaaatacaaaaattagctgggtgtggtggcgcacgcctgtaatcctagctacttgggaggctgaggcaggagaatcgcttgaacccaggaggtggaggttgtggtgagccaagattgcaccacggcactccagcctgggcgacagagcaagactctgtcaaaaaaaaaaaaaaaaaaaaaggtgctagaatcttccttgggtccttgagtttccggcagtgttgcagtaaacgtctgcatttctctaggagacatacctcaaagtggaattactgggtcacataatacatttttcctatgttgattgatatttccaaaccatcctccagaaagtgtgcaatatgagagtgctcattttctcattcatcacctacttgattccttaagtatcttagatgtgagattcttgtagataataatctgatatctcattgccaaatcatttagcacagttatcgattgtcaaaatctttctgaaataaactatgactaatatacttaggaaaagtttatgttcattaagaggtcattgctcatatatccatttgtagcatttgtacaggacattttaacttttttataggatcagtccatgtttaaagattatcagagaggggaacttatgctatacttcaggttaatctactgttatataaactttataatcaggaaataacatttgagaaaatgcctcgttatggtttgatttccttttttttgcatttagagtgtacaaaaaagacaaattggtattcacttaaaatgattatttactgaactctagcctgagtgacagagcgagaccctgtctctaaagaagacaatttttacattgacaacatctatttcttcatggattaagtctaatttcttcttcgtatatttactttacacattttgccacatgtaaactgtactttgtgatggaactcccctgcctggagatggcaggattaaagttcctctttgtctgtctaccattgacaagagtgaaatcatggcacagaaagagttgggaagactcagatttgagctgcagagacatgtgacttttcgagcaagttactgaacctgtctgagaatcattatctctgtgtgagcacgagagtttttgtgaaagtagaaacgctgtgtattaagtacctgaacatactcagtaacttgtaacaattataagtctttaaacaacctttctgccttataatgctttgggaatcaatttcaggatgatttttaggggaaaaaggaaattctaatttgtagcagaaccaactttggcatacctgggggaaatggtggtatagtaataatttgaaacatttttgagcattggtcactgtataattaaaaacaaaccgctgttgctgaaactattttgtctgttagtaaagtgactgattttagatagcatttcattagttctaagtgttcttttaaaaaagcctgcttctatttctggtaacatggaggattagaagtgcctactgataatagttcagctaaacgtgctacatgataygttacacacacacttgtgtatactgtatcttaaattatatatacacatcttgaaacacatttaagtgtttttagtaaatagtttagctggtgggagagtaaagggatttttctgaggcctgcgtcagttagtgctgtagatccagtgtggtccttgaaagtatctgccggttcctggtggcatagacactgagttttgataggcagtgaacatggggcacagatataaaggctgaggccggggaagaggacataaaagacatgtggataatgtgagaactcccgaagagtggcagcatcctccccgtgggagctattaaaaagaattcttaaacacaggaccacactcacactggtctggagcaagaattcatactatttggtttaggaaggaaaaggaaaaaaagcttgaagtttaaagtgtattggtagtgaacccagcataagtgaacacataccttctctggaggaactctccttaaaccaaggctcaaagattcccctcagatagagtcctaatgacttcattctaatataaatggacctatgtggaaacaagctaccctgagacagtcagcaaatacaacaaattacctaaactctcaaagagattacagatattagaattaccaggtgtagactaaaataagaggagatagaaaatatgatgtgggatgaagagaatcaaagttggccaagtaggtttggaaccaaagggatttgtaaatgatacatatatggtaatttaaaatttacagtgtaacatattgattaagcagattagatacagtgaaagggatgacaaaatgaaagatacacctaaagagacctagatgaaaaatagagaagaaagggtaagagatctggaggaatagaatgcaaaggtcttacgtgttgaatcagcatcccatagaaaggtacgaggatggaggatgcccagtatgcaaaggtggctgaggacttctacaaattggtgagtcctcagatagaagaagccaatgaatactaaactagagcaataaaaggaaatcctagtactagacacaatgcagtaaaactagaatattgattgatgggggcaggaggagaggaagcagttacagagaaaagacagattacccagaaagaactggctgacagatggcttatattttaacagcaaaagcagaagccagaagatagcgcaatgatagcctcaaagcgatgagaaaaaaagtcatcaatttagaattctgtactcaggaataccatcattcaagaatgaatgtaggctgggcacagtggctcatgtctgtaatcccagcactttgggaggccgaggcaggcaggtcactcgaggtcaggagtttgaggccagcctgggcaacacggtgaaaccctgtctctactaaaaatacaaaaattagccaggcatgatggcaggtgcctctaatccctgctacttgggaggctgaggcaggagaattgcttgaacccaggaggcggaggttgcagtgagctcagattgggccactgaactccagcctgggtgacagagtgagactctgtctcaaaaaaaaaaaaaaaaaaaagagtgaatgcaaaataaagatatttcaaatgaaaacagctaaagatgtatctgttttgtgctttttaactttggagagtagggaggaggaaaggaagaaagtcaggtggtgggaagagatcagagatgatcagctgggttctttgtgatttaacctccttctgagccccaaaatactaaattaagatatgctttatatgagttgattgcttttgatgctgatgaaggatggatttgattgtgtctttgcgatttatgaggctgaacatggatgtggatgttggagcacagagatagaagaatgctcagtcgaggagggaactcacatgcatgggggcaggcggatgcaggcagatggctatgaatgctctcaatgccatgatattggggatcaggccaagtttaatcagctctgagaagggggtgccctggctggcaaatgtgaggaaaaaaacatcataaagttgccatttgaaatagaatcccaggctaggcgcggtggctcacgcctgtaatcccagtactttgggaggccgaggcgggcagatcacctgaggtcaggagttcaagaccagcctggccaacagggcgaaaccccatctctactaaaaatacaacaattagctgggcgtggtggtgcgcacctgtagtcccagctactcaggagggtgagacaggagaatcacttgaacccaggaggcagaggtggcagtgagccaaatcacgccactgcactccagcctgggtaacagagcgagactccatcacacacacacacacacacacacacacacacacaatagaatcccattcatagtgatttatgtagtcaaaatcagtttacttaataattgaagctggcttattgttcagtagaccacccctcagagtcagtgaaaacagcagcatttcaaaatacatttttctctccgtaaattttcttcctgagaagattttcgtaagatttggttggaaagctggctcacattgttactgtactgtacttgccttcatcagagaggctataatgaagtgagatgatagtctaggattggttaaaatctagaattggttaaagtctaagggcagggttcttaggccagggccatagtcttaaacatttcagtgaagtcactatgatgaaaacaaactgcatttggggccgggcgcggtggctcacgcttgtaatcctagcactttgggaggccgagggcgacggatcacatgaggtcaggagttccagaccagcatggccaatgtggcgaaacctcgtctctactaaaaatacaaacattagctggcacagtggtgcaagcctgtagatccctgctattagggaggctgaggcaggagaatcgcttgaacccgggaggcggaggttgcagtgagccaagattgcaccactgcactccagtctgggcaatacagtgagactctgtctcaaaaaaaaaaaaaaagcatttgggctactccttgggatttattaaaccacccatacagatatttagtctatttgtgaattctggtcataataagatatccttaagagctgtatctactaaagactccgataaagagttagatttatatggaatatgaatgctttgaatttccattgttttgtgctttattctgtttgcttaatagaaataaaagaccatattatgatgtttgttaaattactatggataaagacatagacactgagattgaatagaattacccctttgtttttaatccctgtctgtcaaagtcatagccagacttcttcacaaattctatactgaataaaatatctgtttttgtattcagtgtaaaaaatggaaaccaacaaatgaaatcattctatggctgattcagagctgtttaaaactattacctaaattagtttgcagttcatgattttatagcacagtgtaaaggatttagtgagacctcacttgcttggctttgagaatatttctgtgattatggatatgttggcttggtgggctttgacaatccttgaaattggcttttattaacttgtaggctcttcaataaaacattgaaactataaaatatgcagagctgtgctctaattatctgatttaaaattactattcgtattgatccattctgtgtggtcaaatagcaaggttaaaaagtgatttatttttcttcctttacgtagactaaacccagaataattattgggtttaattacataattcctggttggcacaggaatttacagaattctctttcttaggcatgtatctgattacaaaaagacaatcaaaattcttggtagaatcatatatatgtgtgtgtgtgtgtgtgtgtrtatatatatatatatatatatatatatatatwttttttttttttttttaagtaatcctttctttcccacccactggcagctgccaaacatacacacgtgactttccagtatgtgtgtgaggaggtttctctcctgtctgaattcagggaacaaacgtctcccttaaattccttttgaacaaggcagagtgtaataagtaaattacttaagagccggtccctcttgtttttgttcttattcttacatagggaaaagtggttgggagatgcattctagttatttgcatgagcatcttttcgtggcatactttcactgtgcctgatgtgcttgcctcttctgcatcagtggctcattctgtataagcaaatcttagatctttaatgttagctctatttttcttttctcagaagtgccacaaaattaagttttgtaagcattctgtcatttttaggtggggaagatgatacttagatgtttatagactctaatattgaaagaaacaaaagcactgaatttggtgggaaatgtaaggcaagatgtgtgcccatttaaaacaccaatttttttttttttttgagatggcgtctccctctgtcacccaggctggagtgcagtggtgcgatctcggcccactgcagcctctgcctcccaggttcaagcaattcttctgcctcagcctcccgagtagctgggactacaggcacacgccaccacgcccggctaatttttgtgtttttagtagagatggggtttcaccatgttggccaggatggtctcgatctcctgacctcgtgatccgcccgccttggcctcctgaagtgctgggattacaggactgagccactgcgctgggccaaaatactaaaatattaatatggatggraaaaagcaatcarcttctgagtgttcccaaggaggtatgacattattcagggactaatcctgcaagtggaaaataaaacttaaatcatggtcacataagtgtgtatgtaataaagtcaaggcaatttgtgccagttatgacttgtcaagtatcattcttctgacatcttagaattgcttggcaagtttattttcatgacacattacccatcctgaaggtttcaataaaatgatactgtatagagatctgacctcagatccttcttgcactctttaatgttcatgtcctaattgtccccctgccgtacccttctaatttctcaaagtagagggaggcagttgtgtacactctgaaactaaggagcagatttatgaaatcaasaatacttttggctcctaagagagaaaagtaacatttgtcttctttttcttccaggttgtccttctattcaggccactcttcgttttccatgtactgcatgctgtttgtggcagtaagtactttgtgtctgttgacggttaggttatgtgctgcatggaattaatgtgctcagcatcagtgtcctcacctgtcctaataaattagccagtagcaaaaggtgaaacagatgatctgcaaatctgtaagtttcatrctgagaagtagttgatgtgtgcccttactttgggacgtttcctgaagtggttttctggaacacagcttctgtgtaatcacagcaggtaactaatctgaaggactgggacaacaggctgctgttgcttgttaacctcctccctaactgggagccactctcctcatctgctcagtgtgggcgaacagcagcagagcttctttccttctgggctctgctgtggtgaggagttgggttttgatcattgttaagtgaaggcagctgtccttgttcctatttgagcagattttgttttcctcccattttctaaaacattcccagagtgctctgcaagggaccagaaaggtttcaactgctgggaaaggcagttgccacttctggagcctgtcatctatacaacttccaggtccagttctgatgccaacctgtagagcagcagcatagcaatttgcatttgcatcatacaaagctggcagtgaggccttacgaagatttgcacccacattttgcattatcaaactagagatgaataygtagttttttgagagtaactaatgcaagaccaggcttcaggacacattcaagggatttttaaaggtcaattttacttgatttttatttttttataatgttctctttacatataaagtattaataaaacactatatatttgggtgtattaatatgtcctgcattatcattatttagggggaacagagaggagggttagaaaatctgtaccctaatagatcagctataatttttgtcttaattttctttataaggggatttttatacagttgtgttctgtgtaaatttgtcatttcctgtgtttttccctttgatcacattaagtgccgtatgataatttaatgcttagacttaaaatgcacaatatgtaacattaagggtaaactaatgggaattagtctcagagataatttaaaatgttttactagaatcttgcttttatttgaaaaaacaaattccaaacattaaaagaatatgtaaattgtagatgtgttatataaaattcaaagtcagaacctcaagccattacaacagctaattttcaaagctttcatcttacattaattaaattttgtgaagaagcacagagtatgattcagcagaatttagggcttcctttttaagacacacactcaaatgtttctgcagatgcggcatggaaaatgtgacttatctgaaggtagttagcagcaaatactattctgacatcttctgttcatttatcctattagaaaaaaatcagcattctttcttaagcgagacaacatatttttttctttttaattagagcacgaggaccagggcagacccggaaggctgagcaatagctagagccgttactatcctgagagctcttcccagagcatgggcctgtgactggactgaagggcgtttgaatgtgtgggcgtgctttgtatgccctgggctagacctcactaggtctagcttttgtctcactagctattgtggtttgtttttcgctcacctgtctgtgttagtgtccaagtccctctttatgagaaatctagaaatctgagttttgattgatcttgatgatgatttgcattttacactacttttatttttgactaaatttccatgaaaagatgagggatgactgccactgttttacaagtgagggaataggcaccttgggagggggctgctgagttctgtgagctctgtggggtttcttgataatcaggatcccatgctgtattgatkgattgattacttggtctgaaccctagtccatttattttgaaggtcagctcatgcagatctctggaagtaaaatggcattctggaagtgactgacacataactttgacccactgtttgtaattttaaagaaaattctcagctataacatattccatacttcatcattttctgctcttcttccttgacccttctcaaaacacccattaacgtctgtgtaattggtcaaatagtaacttgtactgagggctgttttgtgaaagattaaaattactatagagaggatgacattgatataatagagggcctcagtggcaggcctgctcagtggacatgcagccacatatgaaggatatcaactcgggaaaatgatgtcaaccatagtgtggtaattgggtcagtttgaaccaactgtgttaaaagaacaactttagataaatttaagggtgtcactgggcaaggaagaaacgactttcaaattgggcagccctcagagtcactgcagattcagaatgactccactgcttctaagtggtcagggagaatttatggacagaaaaaggaaagtgagtacagaaaatggaagcgaggtgcagaaactgccggattggttacagctcggccttggagctttatttgagcgtggtttgaatggctgtgagtggttgaaatatggctgcagggactggctgagactcagctgctgttacagaagcacattcctgagtcaggctcccagtttgcttacttaccaaattaggttgttctttgtacagaagaactcaagtatgtgagcagggggttttcaggccagattttagtttgatttaacagatgtaaagttataatggcaaaaaaagaagcctagataaatagatttgttgtagaccaagacctttctggagaagaaagcaggccagagcaaccatgcactgcattttactgactctaggtagtggaaatatttgcttgatgtggatgtaggccccagcttttattttagccctgaatacacagatccttgctttttacatttatgtacaacttttttttttttttttagacggagtcttgctctctcacccaggctggagtgcagtggcgcgatctcggctcactgcaagctccacctcccgggttcacgccattctcctgcctcagcctccagagtagctgggactacaggcgcccgccaccacgcccggctaattttttgtatctttagtagagacagggttttaccgtgttagccaggatggtcccaatctcctgacctcgtgatccgcctgcctcgggctcccagtgtgttgggattacaggcgtgagccaccgcgcctggcctatgtacaacatttaacctctaagccccacccccgaattccttgagcaatgactcatcttgtttctctgggcaccttggcttcatgagtcagtctcagatttgggtagagacgtagtcatttaaatcctctcctaggacagtctttgatagccaaaacttccctgtcaattcctgacacccagaaattaacttctagttaaaaatggctcttaaaacaccctgaccattgttcttctctggcagccagtgcagccctgcacacttaactgtgccaagagagtgtcagcatcagtgaaaacctcccaggcctgcgggagctcagggcagggctgctttgcacatagccagtttatatgcttagtgactccccgtgaacttggctgaatgccagagattccaaatttatttgattattcaggagaacagccatggtatgagtctgtattttctttcaatacagtgaggagtgttaaaatacttttcctgagacccttctattgaggctgtaaccccagattgtttatatcaccrcctgttatgaaattcctgtatctatgcttcagccagactctcctcctgccacaaaatgcctcttatctgggccttgcccctgccctgtgtttagacagtgctgcccacctatctaaatccactcagactctttcatactatccactttccttaagattcatataatccctcatttagcattcactgtatactacctagcattgttgatacttcgtgatgttttccaaacttgattattgctgaacattgggcaaatgatgaacaactcatggcccatagcctacgaaccttgtctgattttgaggtgggatttaagatctaaatttagtgcctcagtgaatcctaaaaatggtgaaattaaaacccaaagaagactaaactgaggcctgctttccagtgttcttctggacagatctgtcatcaaatgtaggtggagcaatcaatttggcttgcctggctagtcataaaagcactatttcaaaataagtagaccaaggtatatttctttgcattgagcctgctgttgttagtctagttctggggttggtattttttttttttttagtgaaaggtcagataataaatatttaggctttgtaggtcacatattcttttttgaaaaaacaaacaaacaaaaaaaactccttaaaaatgttcttagcttgcaagccaaccccttgactctagtttaaaatggaaaaaaaaaagttcttactttattaacaatagaatattcagaggctatgagacaataacaacattttacagttaagaagtgttaacaagattagtcaaggaaaggcaaaatcaaaacagcttcaaaaaatatctcgttcaacgattatttattttaaaggtgagatattctaattagatcctttaatggaagttaaatgtttcagaaatttcaaccaaaaatggttatatatccttcctgtcttagtttgggctgctataaccaattgcagcagactgggtggtttataaaaaacaaatttctcagtctggaagctggaagtctaagattagggtgccagcatggttgggtaatggtggggccttcttccaggttgtagaatgtcctcacacagtggaaggggcaagggagctcccctggatctcttattaggtcattaatccctttcatgagggttaaccccttatgacctaatcacccacaaaagtcctattttcctaatcccattgccttgtgggggttaggcattcagtatacaaattttggggtaacacaaatatccaggcaatagcaccacccttcagtgataatgaaagaatgcctaagtagtatcacagatgttgaattttctagtttcttttaatattaatttttaaacaaaagaaaaaatgggcataccttgtaatttgttcctgatgtggctctgtgtaatgaagagtcttccgtttgttttgaccaggtcttctttgtgcactttataaaactatcatgaggctcttcacaagcggagccacacgttttggagtgttggtttattagtctgttttcatgctgccgataaagacatacccaaggctgggcagtttacacaagaaagaggtttaattggactcccagttccccgtggcttaggaggcctyacaagcatggcggaaggcaagaaggagcaagttacatcttacgtggatggcggcaggcagagagagcttgtgcagggaaactccaccttataaagccatcagatctcgtgagacttactatcayaagaacagcatgggaaagacctgcccccatgattcagttacctcccactgggtccctcccacaacatgtgggaattcaagatgagatttgggtggggacacagccaagccatatcatttgggactgggaggaaggcctctgtgcttctcagtgaagcatttgctgcctgcaggtggaatggccagctttctgcaaccctcctttctgggcttgaacacctggttattttgagcaatgtgatgcttggtgtycttattgctctaagaaataggaaattgcttgtatgaatctctagtaatatcctggctaagaagtttttttttttttttttctctgagacagagtctcactctgtcgcccaggctggagggcagtggtgtgatcacggctcactgcaacctccgccttctgggttcaagcagttctcctgtctcagcctcccgagtagctgggactacaggcgcacactgtagtacaaagagacagggaggaatagaaatagcctaactgtggtttccttctgaggcgtcggggttgccatatgttgtgttcctgtggtatttgtatatccagcccattttaatagatgaaaatgggggagggaggagtgtgaaggtcaggygaagaatatgatgtatctttgtttttcctattaatcttcatttaaaatttgtgtgtcctggaaacccatgtctcttcctttccagttctagagttgtgttcctgtacgttacagcagggatcacactagtggcacactcaagtgttcttttgataaatgacatttactcttgatgtatatcaggatagcctccaaatttgggagcagagactataaatactagaaatagtcatcctttttaatcaaggaaggaaagcattttttggtatgggcagctgactggagattcttccgcatccattctccctgttccaggtgatctcttgtattaataccttttaaaaagcccagttaccactgcacatctccctcagcatacttscccggattaggcccccttttctgcatttctctggtggctggactaatttatattccgagcagcagtgtagaagagttccttttctctgcatcctcamcagcatctcttaatgtttttttggtctttttaataatggccattctaactgaggtaagattgtggttttgacttgcattttcctggttagtgatattgagaattttttcatatacctattggccatttgtacgtcttcttttgagaattgtctattcatgccccatgcccacttttcaatgggagtatttggttttctaccgttgagttgagttccttatatgtcctggatattggctccttgctggataaatacttggcaaatattttctcccattcaacagactgtctctttattctcctgattgtttcctttgctgtgcaggtttttagtttaatataatcccatttgtctatttttattgcctctgtgttcaaggtcttagccataaaatctttgcccagaccaatatcctgaagcgtttcccctatgttttctttgattagttttatcgtttcaggtcttacatttaagtctgtaatccaacttacttgagagataggggtccaatttcattcttctgcatatggatatccaattttcccagcaccatttagtgacgagactgtctctattgtatgttcttggtacctctgtcaaaagtcagttggctgtaaatacgtggacttatttctggwatctattctgtttcattggttgctgacgagtctgtttttataccaatactgtgctgttttggttattatagccttgtaatatgaagtcaggtagtgtgatgcctccaagctttttttcattttgctcaggattactttggctttctggctcttttttaattctgtatgaattttaggattttttttttctatttctgtgcagaatgtcattggtgttttgacaggggttgcattaaatttgtagattgctttgggtagtctggtcattttaaccatattaattcttctgatccttatgcgtgggatatctttccacctgtttctgtcttctgcattttcattcaccagtgttttgcagtctcctttgtagagttcttttacctccttggttaaatagatccctaggtgtctttttttcttcttcttctttttttgtagctattgttaatgggattgctctttttttttttttttttgagacagagtctcactcagtcgctcgcccaggctggagtgcagtggtgcgatctcggctcactgcaacctccacctcctaagttcaagcaattctccctcctcagccttcccagtagctaggattacaggcatgcacccggctaattcttgtatttttagtaaagacagggtttcaccatgttggccaggctggttttgaactcctgacctcaagtgatccacctgcctcggcctcccaaagtgctgggattacaggcgtaagccacaatgccaggcctgacctcttgatttctttctctgctaattcactattgttgtatagaaatgctagagatttgggggcatggtgcctcacgcctgtaatcccagcactttgggaggatgaggcaggagaatcatgaggtcaggagatcgagaccatcctggctaacacagtgaaaccgtctctgttggaaatggaaaaaattagccaggtgtggtggcacgcgcctgtagtcccagctacttgggaggctgaggcaggagaattgcttgaacctgggaggcggaagttgcagtgagccaagatcgtgtcactgcactccagcctgggtgacacagtgagactcggtcaaaaaaaaaaaatgctagagatttttgtatgttgattttatatcctttaactttactgagtggccgggcgcggtggctcaggcctgtaatcccagcactttgggaggccgaggcgggtggatcatgaggtcaggagatcgagaccatcctggctaacaaggtgaaaccccgtctctactaaaaatacaaaaaaaattagccgggcgcggtggcgggcgcctgtagtcccagctactcgggaggctgaggcaggagaatggcgtgaacccgggaagcggagcttgcagtgagccgagattgcgccactgcagtcctcagtcccgcctgggcgacagagcgagactccgtnnnnnnnnnnnnnnnnnnnnnnnnnnnnnnnnnnnnnnnnnnnnnnnnnnnnnnnnnnnnnnnnnnnnnnnnaaaaaaaaaaaaaaaaaaaaaaaaactttactgaatttatcagatctaagagttttttggtagagtctttaggtttttctacatataagatcatattgtctgcgaagacggacagtttgatttcctgttatacaacttggatgcctttatttcttttctttttttcttttcgagactgggtctccctgtcacccaggctggagtgcagtgacacgatctcagctcactgcaacctcattgtcctgtgcttaagcagtgatgctcccacctcagtttcccaaatagctgggaccacaggcacatgccaccaatcctggataattttttgtatttttttttttttttgtagagatggggtgtcgccatgttgcccaggctgttgtgaactcctgacctcaggcgatctgcccgccttgaccttccgaagtgctgggattacaggtgtgagccaccacacctggtccgtttatttctttctcttgcctcattgctcagggttaggtcttcactgctatgctgaataggaggggtcaaagtaggcatccttgtcttattccagttcttagaggaaaggctttcagcttttccctgtttaggatggcgttagttgtgtgttcatgcaacatttatcatgttgagttatgtccccttcatgcgtagttcctgtggacaggttttttttttttttaaatcatgaagggatgttgaatgttattaaaagactttcatcacatttgaatgtgatgtgtcacatttattgatttgcctatgttgaaacctccttgcatccctgggataaatcacacttgatcgtggcataatatctttttgatgtgttgttgaattaggctggctagcattttgttgaggatttttgcatctgtgttcatcagagatattggcttatgggtttcttatgttgcatccttgtctgtttttcgtatcagggtaatgctcacctcatgaaatgagttagggagaattcccttcaattttttggaatagttagaggagaatgggtgttcttctttgtaagtatggtagaattcaataataaagccatttggtcctggattgggaccaaatgggagacattttattactgattgaatctcattactcattattggtctgttcaggttttctatttcttcctgattgaatcttggaagattgtatgtatccaggaattgatccatttattctgggctttccagttcatgcacagcagttagcagtagtctctgatagctaggcatggtagcttatgccggtagtcccaggactttgagaggccgaggtgggagatcctttgaagccatgagttcaagaccagcctgggcaacatagcaagaccctgtctctaccaaaaaaaaaaaaagaaaaagaaaaattattcatgctggcatgctctgtagtcccagctactcaggagactgagacgggaggatcacttgaacccaggaggctgaggttacagtgagtgatgatcacgccactgtgccccagactgggtgacagtgagaccctatctccaaatagatgattggagatagatgttcttttgtatttctgtgttatcagttgtaatgtctttttcatttctgaatttatttgggttttctttttctcttgtcgatttcrtttatcctttcataaaagcaactttttttgttgatcctttgtacttttaagagttcattttgttaagttctgctctgctctttagtatttttcttccaccaattttaggtttgttcttgtttttctactatcttgagttgcattgttagattatttacttgaaatctttctagatttttgatgtgggcgtttattggtattaatttacctcctagcattgttkttgggtttcggtatgtcctgcctctattttcatttgtttcaagaaatttttttattcctttcttaatttattccctgacccagtggtcattcaggagcatgttgtttaattttcatgcatttgtacaatttcccaagttcctcattattcatttccagttttattccatcacgatctgagaatagtttggctggtggggtttatttttctttcagcacattcaatacatcatcccattttctcctagcctgtaaggtggctgctgagaaattcactgttagtctgataggtgttccccttctaagtgacttgatacttttctcttgctgttttattctctgacttttgacagtttgactgtaatatgccatggatttttgaattgcatctatttggggttttctaagcttcctgtgcctgggtgtctaaatctcttgctagacttgggaagttttcgggtattacttaatcaaataggttttctatcccttttatttttgttttctgagacaccaaaaatttgaatatttgatgactttatggtgtcacatatgtcacagagctgttgctcattctttcttatttttgtctgggttcaaaagacctaatttttgaagttctgaagttctgcttgatgcagtctattgttgaaactgttggatctattttatatttcattcaatgaattcatcaatttcagaatttttttttatatctatgtctttgggaattttctcattcatatcctaaatggtttctctgatttctttgtattatttttctgattgctgttttcttgtatctcactgagctttttcaattttttttgaatcattattttgaattctttttctgagatttcacacatttcttcattggaatctgttgctacaaaattactgtgttcctttggaagtgtcatatttccttcttcatgtttcttgaatccgtatttcggtatctgtacatctggtttaacagtcacttcttccaattttttgaatttgccttcataggggaggatattttccttaagatatatctgtggtgttggtcgggtagatcactttggctttgattccagatgcatgcaatagtgtagtctcagtatgatttctttggctgtaaagttatcagttgtgtgtgatttcctcagtggcttaagttgcagtttttaattgctgcaatgaagcatttgctggagatgggaacattaggtgggcccatcctcgagccccaggagtggcagcagcaggctgagcatgcctgtccttgggccctggggcagtgtatgctggcactgatgttagagggtccaggtgggctgattcttgggtctccaggaagcttgcttggatgccagcagtagcacggtgggaaggtcctcgggcttgctgcccatagacagcaggtgtggtgcgggcagtggcaggacaaccctctgattcccaagtggtttgcgctggtggtggtggtgaccgtgatgggctgggtggctagtccccaggcccataggtggtgcatgtgggtggtgrtagcagcaggttggatggtcccttcctgaggcccctgggaggagtgctcaggtgttaatgataggtgcaccctccaacgcccgatggtgtgcttgggcataggggtaggtggagccgggctggataggtccctcagtggtgtgtatagggcttggctgtggtaggtaggggtgtttttgtgtggcagcagtcataaacaggtgggttgggagcatgcactttggccccagatggtatctgcaggacagggtagcctgtaatcaggcttgacaatgcacagtggctctgctggctcactgccagtagcttgtatactttggccctgcggcagcacccagctgtgggtgggggactttaatggggcttcagagatgtggatatgcaggggctgttgggcctcagggaatgatgcagtctgctgggggtggggctctcaaaatggtgccctgctgtagctgcttaggactcrgggggatgagctccctctctggagcagtgccatcatgcagtccccaagttccctgtttgtgtgggttgagggtttcttccatggctgggattgcaggacttcacaatgggaatgcggatgctgactgttgggggtcacttacccttctccagcatgggggagcctccccaaccaatccctgccaggtaccctgccttgcttccctctccttacttgcctcaggtgtttcctgtcattttggtggtaaattccagcattctctcttaggtgatctattcaaagtgtgatttatctactactgttttggtggttcttcaagcagaaagcaagtacccaggggcactttagtcagccatcttgaaaccactccattgttttctactaaatggcttgctgtcctcgaccatagcttttgcttcctcctaactttagtttgcaaataacctattatgtacccattaggcatccttcctactacttttgaaattagagaacgccttcatacttytggtataaattccagagacaaaatacagcccagcagrtctctgggtgatgcctggtgtaagtcatctagtcagtgcagggagatgtgggtatgcaaggagaaggcagggctatgtggtccaaataggactgactgtgaatgggcaattccacctagaaggggaattaaaagtaataatgttgctgccgagcctgtctggtaccacacactgtattggacatacagctctgttaagttcctactcttaaragagaagtaactaactgaatgccttacctagaatgggtttaatagataaggttggcaaatggcatgtatggggaggagagaagagtggaatctgcaaaggaaggaacctatacagcctttttactattagccttggcgctgaagcatgagctrtgtcccctgtatctagttctaatagaacagtattgagaagcttcagacattcaacttttcagtggcatttagggaaagctaaagtaatagactttcttttaaaggaagtcatgtcaagtgtttgctttgcccagaatcaaagtagagccaccagaaagacactactttttagctttgttgaacttacgcatataggaaacttttgctggcaaggtgggaggggaaaagccagtccggatttctgggcatgtcagctgtggaattcaagtttacccaaggtctgagaaattcagggtgtccactttcttgagctctacagaaatggaagtcttcacagagctacaccgagtaccctgacccagggaaacgcagtatgggcacataggaagcacactcaggccatgcctgtttgtcactagagaagccaaagcctagagcacaaggttaggtacagaaccacaactggggcatcccagaattctcacggtgaaataatttctgggtccatggtcagagtttcactgatgggggaaacctctattcttgggtagatgtgtaaggagaaaaacagctatttatagggggaaagacttcacttagaagtgttggagcgagctgggtgtggtggctcatgcctgtaatcccagcactttgggaggctgaggtgggtggatcacctgakgtcaggagtttgagaccagcctggccaacacagtgaaacatcgtccctactaaaaatacagacaattacctgggagtggtggtgagtgcctgtaatcccagctactcgggaggctgaggcaggaggattgcttgaacccgggaggcggaggttgcagtgagccgagatcgcaccactgcactccagcctgggcaacaagaggaaaactgttccctgcttccccctcccacatccccccccccaaaaaagtgttggagcttagttgattattgataatgttaagtaaatgttaattcttttcactggcatgttggggaagaaatctggagaaaataatattcaatatgagtttgcaggctatctacagtgaaagtcagggttstttagaatggaaatattgctacagggattttagaatcttaaaagaggaaagaccttgragtcctagctctgagtttccttcaggttggaagtagcatgggactagcttaagtccattctagagttgctatttttgatttgactacttacttttttcacagcttgaacaacaaacaaaaataaggattctgcagaaagccagtggttcttaaacttgctgatgagtcagactcagttaaacagctggtgtgctcttttagaactagatggtttatactaagtacttgataaaattagataagccctgggtctttgccagcttttggtgactgaacacccatggcagtgcccagagagctgggaatggatttgtgtcatctattttaaataggcagtgtccatggggagagctatgtatattgttttctaaggactgcatttaattwagtctacgagtcatatattattgaacagaattttaaagggaatgttataaattatattgttattggatagaaattaggtagttttctttttyttytttttaatgagagcagactccctaaaaagaatcatttctacataaaaccttcagagatgcacccaaagtcaaaggcagactgacatgagaaaggggaatttcttaggtccgattagtgtacagaaaactcatagaacttaacttaaaggggatacaagtactgttgaaagaatacacttcttggctggatcataactaaactacaacctatattacttgcaaatacagattatttagtctcagttgccttgttaaacaatttgagggtagaagagctctctttggttaattaatgaaatagtccctagataggcccagagcaatggcaacctgtgcccagaatgctagcactttatcccaagactcagaactaaccacgatactgggtcaggcatggtggcgcatgtctgtaatcccagcactttgggaggccaatgcaggcgggttacttgagacgaggagtttgagaccagcctgggcaacayagtgagacccccatctctataaaaaaaaaaaaccaattagctgggctcagtgacatgtacctatagtcccagctacttgggaaactgacatggaaagattgcttgagcccaggagtttgaggctgcagtgagtatgactacaccaccactgcactccagtctgggcaacagagcaacrccccatttctttaaggaaaacaataaaaaaaccaatggcagcactggtcttgactatgagaattataacccaaattgcaaggggaggaactgtccctgaaatcctgtttagaaagccataaacaaggaaacacctgtttgtatacagtttgaagggtggtatagctagactggcaatagattcttgtgaacaagttagtagggcaatagttttgtttctttaaaggattaacatttaggtaataatgcgtacgtgaatgtttgcctagaagtcctgttccctatataataatacttkgataatcatttcaaatgccaacccttccttaatataaaagttttgcgttatgttaaataaactatttttttctttattcttttcttttagctttatcttcaagccaggatgaagggagactgggcaagactcttacgccccacactgcaatttggtcttgttgccgtatccatttatgtgggcctttctcgagtttctgattataaacaccactggagcgatgtgttgactggactcattcagggagctctggttgcaatattagttgtaagtatayaggtcaacagcctacatcttgatattgctaaacatttanataagtaaatagaaaaaaaaaaatccaaaaaatccccagctgaggagaagactatgcagtgggcragaatctcaatgttattaaaagtcacttcaggatacacaccaggttaaaaactaggttgctctttctaaaacttagtakttttgtaaaatcttagtatttttattgtgaaaggctctggctagaaatagtttttttaggggattatgacttgaaaaaactaattcacatgtagaaataactcttttattcagtattggcaaaatgaagctatttgctgaaggcataacaaagcaactcttaatttggaataatctttaaaaaatcccagttagtctctaattttttatatgcttaatctgtacacctcaaagtatatccttttgtttatatttatcttaggatgctgttgatcacaactttgtatgtagtttttaacttgatctaaattataccattaaatattttgcactgtaggctgtatatgtatcggatttcttcaaagaaagaacttcttttaaagaaagaaaagaggaggactctcatacaactctgcatgaaacaccaacaactgggaatcactatccgagcaatcaccagccttgaaaggcagcagggtgcccaggtgaagctggcctgttttctaaaggaaaatgattgccacaaggcaagaggatgcatctttcttcctggtgtacaagcctttaaagacttctrctgctgctatgcctcttggatgcacactttgtgtgtacatagttacctttaactcagtggttatytaatagctctaaactcattaaaaaaactccaagccttcyaccaaaacagtgccccacctgtatacatttttattaaaaaaatgtaatgcttatgtataaacatgtatgtaatatgctttctatgaatgatgtttgatttaaatataatacatattaaaatgtatgggagaaccaaatccacacttgcaggcatttgtagtcaactgtaatcaaacaggtggtcaataatttaaaatctcacattcctttagctgactctacaagtagaggctggcagcaaacacaatatctctcttgattttggtgattcctaagagaaaagaaagtaaggtttaaactttcaagaccacaaaacacctaacttgcctctaccgaaattttaaagccagtataccaaccctgattcaactggtaagcgagcagcctagaaagtcaaacaccttgctgaacacctagaggaatttgcagccacctctgtgaggtggaaaacatacaagccagacccctgttcttttgactctgaaatactccatgggggctggccaggaaagaggtgtctagaactgtttaaaaagataaatgctaggtcgggcgcagtagctcatgcctgtaatcccagcactctgggaggccgaggcgagcggatcacctgaggtcaggagttcaagagcagcccgaccaacatggagaaaccccgtctctactagaaatacaaaatcagccgggcgtggtggcgcatgcctgtagttcagctactcaggaggctgaggcaggagaatcgcttgaacctgggaggtggatgtggaggttgcagtgagccgagattgcgccattgcactccagcctggggcaacaagagcgaaactctgtctccacacactaaataaataaataaaaataaaaataaaaaaaattatagggaaggactaaactgtctaaagaaatgtaaaatccaaagacttggattttcaacctatatcagaagacacttttttttcagttcccatgtgaaattctttctaggccaaggaaggacaaatacaaattttgattacaaattatttttaaaactttgacacctacacttaaattctgagtcattaaacaggcctacatttatcaactgtggaaatatcagccagtttttgcaaacctcttcttaggacactaagttgtttgcagaaatcactagcattgactgactcagcaacaatgtggttatattctttgattaacttagtcctttttcttggtcaagagtcagtagacaggactgaagcttatgccccttgcccccccaccaccactccattactaccaccttggtttagccatcctttcttgatctgttctccccacttctactgtgctactctacagacttgccctgaatgtaagagcaacaattaccttgtaaagtccaagttggggcaggtcactcccaaactccacacctccagtcactgcagagttgagaagcctggggctgggaactatggaatcatttcctttctcacttcaacccctactcctctactcactgcccattctgctccagccacactggcctcttgctggtgttcacgtacatcaagcatacaccaaaggccttaactgccaccttccctgtggaggccctagaccatcatatccatctgccaattctattgtcttttctgctttgtttttatcttacagacttatcaccatctgataaatttaattgttgacttattgtctatctccccacactagaatgtaaactccatgaaggcaggggtgtctttttgttcactatatcccctagtgcttaaaacaatgcctggcatgtagttagcgtacaattaatatacgtaaatgcatgtatatataaaatctcaacttttcccccaacacactaaattttatagaaacactagtagatagctctccatgacaatgcagtgaagaacatctcaaaacgtcctcctaggttgtggtccagggctcaagatttgcttcaccaaatttgtctaaattagaaacagcttatccatttgatactgaccttctgcaaatttattttccagctcagtgtttccaatggcttttgctgcttgacacatttgtcgaagcaattcttccaggcgcctcatacaacgaattatgctgcctggatagaaaaggaacaaaacactggtaaaatggaaataatcaggaacagcagaatttttgttaagaggcaaggcaggagaacacaggataattaatagtactttgagggacttcccatgaagtaaatcatggttaggtactggagaaagctacaaagatgaaaggcttaactcccacctttgactaatggtagagacacctgtttattactaacatgctgacacttggtattaagtaggaaaacaaaatgccctagaaggagggagcaactttgggtgaaggctgcaaggatgacataatctgtgtctgtaagaaccaggcagtatctctcaggcagcagcaacaagggaaggaccaccacgacaatgcagaaaagcctggcaaactgcagctattcaaggaccctgagtgtggcctagtgaggcatctggacaccatccataccatctcatagaatgcaacagactgtttttagcaggagagtaacaagataaaacttgtcattttaaaggtgcattcattcttcttgaccttagattctttcattagtacgttctttacacagtgttctcaaggagcacaaggaaagaagccttttcccatgggtctagaatctgtttgagaaaagtgtttgtatcaaagctgaagctataaacatagtttcacttttgctagacttgtccaaagaggagcagagattgtgagatcctttctctaagtgctacctgcctaaatctaaaacgcttgacttcatttttaatatatgaaatacattaggaataccagttctcaaaatgcagtctgtaggaacaatgaactatttacactattaacaattattaaattaataataattatttgttatttctattctcagctgctaggaatgcaggctccaatactgccttgcaatgaaacaggaaatccaactgcagaaacttctgggtgtcaagagagagggtaggaattgggatagagagggtaatgtcatattacctatgcaatcagatattaaatgtttatgcaaacaagtatatccaaagataattaaattaggtagtggctcaaaatgtaactagatttttacctgagaccagattctcacaggtcatttaggattgaaatgaaatcctttacaaagtcctctgctgcatagggcattaaagagccagacacattctcaaacattgttttgactgacttcaaatgtgtaccaagaaacacaatgtgatactattatttcacaaattttagtaactcgtgttaaccagaatctgtgaaagttatcagagaccaaaccatacgaagtaaattactaagataaagaataaactaaggcaagtaaatgcacattcaggccagagagcactgtcatgtcacattttgtaaacatttcgactcaatttctggaaactttagtttcgacacagtttcaggtaacaagcaaattaggccagtaggcacaaggttgcatatacaatgactgtggttgttgcccacagagtctcatcaacaaatcactgggtatgtgcacaaacactaactgtccagagctgcctgaaacatagaggctactccccccagggattaatgaagactgacgattaagtagtgaattgtctagcatctctcctacctactacagttctctgtaatccaagggctcttcttacacccacctttataagtcatcctgcctcatcagcctgactaagtgctagacaaaagtttcaaagccatgacccatcataggctaaatgaagctgaccaaaaccgaaacaaaacaaaaccacattaacctactggtttgttacaaaattttttttttggtcctgccagagtagaaagagaaatccaattctttctagttattgtctttaaaaaatttttcaaatagtggtaaaatataaaacataaaatccacctttttaaccatgttaaagtatacaagtcagttactgcccttttttatattcaggtttactacattctggaagaactcacatggagacagaattcacacaccataaaattattttaaataagtgtacaactgagtggtttttagtatattcagacttgtgtaaccatcatcattatctaattttagagcatttttaccacccccaaaaaaccttgttcccattaagcagttacatgtcttcctgtccctccagcccatggcaaccacgtctatgctttgtctctatgaatctgcttactctggacatttcatataagtgaaattatacactatgtggcctttgtgtctgccttctttcaacttaatgtgtttaaggtttgtccatattgtagcatgagtcagtatgtcttttctaactgaaagctgttccatttaatctttattacaatggaacaccttgccattaaaaatggcaaaaaccacaattactttggcaccaacctaatatataccacaatttattcatctatcgatggacacttgggactatatgcttttatttaagagcattttaataaacatcagccttacccggttgatgaacaaaacagcatcattctcattaaggagagaaagcagcagattttcccgaacagaacttctgccttcagctttctggcataccctaaagcagtttcctacagttcatgctctgacccgaatttaatactcctatccagcctggcctcaggttagaatcacacatgtatcttgcaactacttgccgctaaaccccagcttaggctgaaccctttcttgagagcagagactattgctcacactgtaactagcatggtgcctgattcccactagggtctcagaattattcattaaacgagtaagtatcaggtactaaaactgtgccaaaatgtaaagacagaaacaattactaataaattgttactctattattatcagcaagaatacttttaaaagacaaatccactggaaaaccactcatgacactgatgatgctaagaaagggttaaactgctacttgaaaggcatgtgagagaatgtgtgtggtggggacagagttgaggaatgcaattcacagtatttgctttcaaaacatgtggcatacagagggagcaggactgaaaaaaaataaaaagcatatggcaggcagaggtacagtaaatagtttcaagagataattcatcatagaagctttcctaatgacacttgctcagtggaaagcaaatcctttgtcatccttcatagttaagagtacaatattgtttatgtagagtcagaaataaatagtaacagcctctggattacttgactaaaaccctaggcatcagcccatacaaatagtttgtttaaactgtcattcaaatttagtttaatggaaataaaaaacagctaaattctgtcattttttttccagggtgataacagaataaatacttagtcttcaaaatttctcaactgaatcacaatatgaacttttcttttgcattacacatcccccaaacacatggttttaatcattacagtgttaactagcctcagttaatgtttgaagaatacttaaaactacttctgaggctcaggatatgaaatgaccagacacttttattttcatatgaaaagaaaattaagaatcttattaggaacaaatatggtttgcacacagcacattagaaagttccaatgcaattattgtctgcctgtaaaaacagacacactgtactgtgtgctacagctttgattacagtatttttccaatcataaaacatgtgtaggccagctgcagtggctcatgcctgtaatctcaacaccttgggaggctgaagcaggtggatcacttgagcccaggagtttgagaccagcctaggcttcatggtaaaatcatatctctacaaaaattaacaaaaattagctgggcatggtggtacatgcttgtggtcccagctactctggaggctgaggtggaaggatcacttaagcccgggagatggagggtgcagtgagccaagatcacgccactgcactccagcctgggtgacagagccagaccctgttgcaaaaaataaaaaacaaccatatacaataacgagatgaggaaggaatggctattcttgaaatggaagcactatgtaacactgtaaaaacaaaagagagaaatactatcctaagaaaatgaaggt

SEQ ID NO: 95887 - DNA, 50945 bp, Homo sapiens
  misc_feature (1)...(50945): n = A,T,C or G
tataattattttccaaacacttttccaagagcagtttaaattttgtgctctttcattagtggatctagaacttattttggatatagattgaggtagagatatactttttttcttaatgaagaggaaattgttctaacactattgtatattagtcgaatttctcccactggtttgaaatgtcatgtgtgaacattattatgttcatcaatatttagttcccatgttagaccatcttttctttcttttaggcgaggtcttatgattagttctggccaatggcctatgagctggattgctaggtgttacttgtggataagaaagaaaaagcttcttgccgccttttatatttctgtgatcatggaaaaagtttcatgttgcgacagcagagatacaagatttaagcaatgtgtattgtgtagaccctccccaagttatagtttccctacagaacctcttcgtcccaaagtcaattttgcacaaaagagaacttagctttttgagttaagcctctgagattttaggggttgtttttttactgctgcctaagtctatcttatcctgactaatataccacctttaacctatctaaatacccgtaagcgtatggttttgttttttgagtcttcattctgaaccattcatttatttgcttcttctcatgtcaatacctccctcttcaattgtaactttatagcagattttaatatctaagagggccaagacctacatcattattcgttttcaaaatcctgttggctggttttaagcattatttttaaggtagatctttagaattctatagaagagaacttggtgagatttgcaatggtattgcattagatttatagatttatagattaatttatgataattgtcatataaggtcctgcagttttttctatgtcttttatatttctattagttttttgaaacataagggtttttttttgctattgaatgagatctttgtctacattacattttaaaattaattctaagcagtgtacaggaaaataattgacttgtatgtttctcttgcatgtaactgctcttttcctcagctcatttattagttctgaaaataattagatgattttcttgcaccatgacattgtcctggggttgcttcttagaggcttatcaagtcttctggatttgtctctaggcacaagcctgggtgcaattcagtgtattttcatcattcatggtttcttctaccatctgttctaggaaatattactgtgtcctatttaaattctccattctacctcttgttcctgtaaggcatttagcaaatctgtttgtgtaattaaatttttgtactattattactttatggactaattttacagcattgcttaacttatttaatatttccatactggttttaccatcttcgttaggaaaaccatygtataactataccctattattacagagtttgtaatctgaataccatctccttatctttcattgattatcctcttaatatcaagtcctgacctacttttatcaaaggcattgtctatagctatgtattaaaattttctaccattagaatataagttttatccctcttggtaaatcgttttcctactccattattcaagggtaaaataggtgtgtttacataattctcaacatacacttttgaatctttttttcaataagcttaacaaaaattctgtaacatttaatgaacacttaaataccaaggcatcaatccatctacccgcccacaggcttgaaaatcattttctctaatacctttgcataagatgcatcttacaggacctactcacagaaggtaaaaacggagaggcagttcttactctgctctctgaaaatatcacctcccctccaaaataaagaactctcagctgttcataaataagtattcaaaggaaggcagtgagttagtcaaaataggctagactatgcttcagtgacaattccaaattttcagagtggctttttgatagtatggctgcaatttattttgctgcttcttattaaaggatagtctaattcctctccccttcagtctggtgtgtcttcagtgccttgactaatagaatgaggtagaaacgacactcttagacttctagagcaatgcagtttccaccttctgggaactcttgctctagagaaattaagtatgacagccctcaaactgccatgctgaaggaagccgaagccagccacatggagagactgcgtggataagagcaatgcctgtgcagtccccagctgttccagccagcctacactaagtgccagatgtgggtgcaagggacttcaactaattctggcctcggcctccaggggtctgccaccatataaaagagtacaagcaaatatagcccagctgagctcttgaacccccaaaaccatgagaggtgagttttgggatggttgattaggcagaaatagttaacctgaataatctctcatagtgaaaacgtatttcttacctttgtaaagtccttttaagaatcctgggaaccacccaatgctgctattctccaccaggcagctcagcaattcaggctgctctggtcttgtagactcttagatcatgatcttttctctaaaatttccacagcaggagaacagaacactgggacattttgtgccggtgattaaatacttcagcctggaaatgatacatacccaccccttccatttgtagcccattggccaattcatataaatatgactaacttctgaggggtgtaggagcatcctcctctgtggggcagggaaagagagggggactagataggatctaccacactcttcttcccctctctcctgctaatgatgttacctcatcagaggcctaggaattcctttgcctactaggaaccacatatttttgtgtaatcatagctgccctgcagtgccaccatcactctgggggaaaaagccttttctcctagtaccaggtaccaatcttcttaaacctgtaaatccacgttwtaaacataaacatggatcacacactgacctagcatagcattacagcataacaaattgccccaaatcttagtggcttgatattatgtaacaacattgattacctcacagtttccgtgggtggaggtcccagctaagctaagctttgccccctggttctgggtcatttataaggctcacccgtctcaagagcactggtgacagatttgcttctaggtcactcatgtggttgtttgaagatccagttctttgagggctgttgggctgaggtctcagttgcttaggctgcagacctcccttgtcacatggagctctccacacagagtcgcagagtgagtgtgcaagaggaaaagaagtttccagcaaaatggaagtctcaggtttttgtaaccttaacaaagaagtgataatccatcagttttcccatcttctgttagaagtgggtcaccaggcccaacccacactcaagaggaaaggatcacacaagggcctgaataccaggagggagagatcttgggaggagtgccagaagctgtctatcccaagtacatctatgggatgggtattctgcaatacaggggacacaaagatatataaggtaaagcccttgaccttgaagagtttttagtagtggttggaggagtgagggtagagggtgatagctacatataaatgcattatactatgaaaggtatgtggtgaagttattgtattagtccattttcacgctgctgataaagacatacccgagacggggtaatttatacaggaaaaagtgtttattcaactcacagttcctcatggctggggaagcctcacaatcatggtggaaggcacggaggagtaagtcatgtcttacgcggatggcagcaggccaaaagagagacagcttgtgcagggaaattaccatttttaaaaccatcagatctcatgagacttattcactatcacgagaacaacatgggaaagacccgcccccatgattcaattatctcccatggggtccctcccacaacacgtgggaattaggggagctacaaaatgtgatttggatggggacacagagccaaaccatatcagttatacagaagagcaattggatctgagaagagacagcagctcattctgcatgagctatcagaggtacagtgtggactacatgacagagactgaatgattcactggacaactggagaagagtgttctaatcagaatgaaggagcaaggagacactgaagtacacaatgtgctttgggaatggggagtagctttgtgttactaggacacagggaactctgggaatagtggaatgtaaagtgggcaaaactgaagctgggctgtgagaggcattgtgtatcatgctaagtgaagttaactttagtataagaaaaatagacattacagcgtattgttgcctccaaataataatattagtgttggcaatattgtggcaaaaaccacaattatgtttgcaccaacctaatatgtaagctttttgagttagaatatgtgctaggcattattcttatctcatataatcttcacagccaccttttggagcaggttctattactacccgcattttaagagaactttggtgtggactagttttagccccaaatcacatggctaggaagtgtcagggctaagatgccaatcatggtctgacagcaacaggtcccttaccctggtctgtgactccttacggcaaggtcagtcccatacttccttgctactttcttcctaccatccttagtctgaaggctaagacttcagtttttgttaaagataggaaatgctttggtaatggctgtctttcatgctgaagatgctctctctccttttagcttttcattttgtaaattttccaacatatgcatgagtaggtaaagtagcaaaatgaacttagcttcaacactgactgatgttgcaccacttttctttcacctatcttctttccattccctacattttatttctggagcattgtaaaacaaattctacacatcattctatcatgaaagtgataaaatgacagaattcctgtttatgagtcacttctttttacaagcacagtaaaatgttttccattgagtttatggaattgatatgtatgtacttaataacagtgagtcttagtagcattcattgcaaagacattttcttaaatttcaatagtttgtaaacccttgagtgttttattttaatgataagggctaggtccacatagtttttagctaatactaattaatgcataatgcaggccagatcttctcttcaggcaaaattaacttccctctcctataagtattgattgaaatttgctctcatgtgccctgaagtacttttagtcttattgctgtctttgttttaagccgagggcagaaaccacatccttttcatggtctattaaccacattaccgaggttcatggtttgcacaactagtaaacacatacaaagcaccctttgagaaagcttcctcatcctttaattgtaatccagtcttatatattaacggtgtggtggtcccaaggtacagattcatctaatgtgacctggaaagaaatttggaaatcacttaaggctaccctcattttagatctgacaaaactgtagtcaagagaaatgtgaggtccattttactgcaggtggcaatagtcttaattgactcattttatcggctagtacccatgtttttaagagtttctatgaaattaacattttttgtaaaaaaaatgcaattgcataggctagtttcatcaatatcctaaattagtgatgcttcaatatacacatgcagagtacttaaattttcctctctcttcagcaggagatactcaccacgtccctccatttttcattaaacatacgtgtaccttgcagcccgttgcttttatatttgctatcattgaagaggggatggattttaaaattactggccatgtttccctttagagaagcccacacgcgccaaccctgcccttattggagcctgggcagcagcggtgcatgttctaacttaggcaacgttgggtcatctgtttattgtcagcttggcggtcaggaagaaagggcggtggttgctgaggtaaccgacaccccgggcaacggcaagtggaggcgggagggggcgtggcctcgacgggcaagcggcgataagaggtggcgtcctccgcggcattgcgagcaccgccagtctgcgccgcyaggcgtaggcggggtggcccttgcgtctcccgcttccttgaaaaacccggcgggcgagcgaggctgcgggccggccgctgcccttccccacactccccgccgagaagcctcgctcggcgcccaacatggcgggtgggcgctgcggcccgcagctaacggcgctcctggccgcctggatcgcggctgtggcggcgacggcaggccccgaggaggccgcgctgccgccggagcagagccgggtccagcccatgaccgcctccaactggacgctggtgatggagggcgagtggatgctgaaattgtgagtgtgcccgcccgccccggacgccgcagtgtcctcgcgggcgtcaccctcccaagcccgcgcggcccggtggcgatcccgcattgccgcttgggctcaacctaaaaccccggaccaggcttgccaacaacctgcggcgccggtgccgggccgcttgcgatcctgcactgccgctgggctcgacctggggtccgcggacccgccttaccaacgacctgcggctgtggggccsggccgctcgcgccgcgcatgcgcgccgagccctcgcggtgacagccgagggtgcagcgcgtccccttgctttgggggacagtgttttcggggtggagtgggcagcttcccatagggaggagaagggaaggragaaaatctgcaagcaaaccgtgtgcttttagatacagatatgtattggaagagaaaggacattcagtgacatccaygtgcagtatgaatacgtagcacaggctaagcaagttacctgttgaagaaattgcagcacggtgaaggcaggccatttgtgtcgtagtcttccgtttgaagacctkgagatgtcattgtgagaataaaacataaatatggatgccttttaaattttacartatgatttcaaataaatgttgatacttattataacttgtaaaggtaggactttctgagtaatattaataattgtgccataaagaaaagaagatacgcattgccccttttaacaatagaaagcaaatggtggatagtgccttttctttaaggagatgggaaactacagttttgagttaggagaaagaaagggatttgttgattatagtttaaccttataataggaagtgaccatttgaaagaggcttgcagtggatggtgggcagatgtctgagcgggcttgagagaccatcatggtgggcttgcagactctctctctctctctctctctctctctctctctctctctctctctccccctccctccctccctccctccctccctccccctctctctctctctcctctctctcttctctctctctctctctccctccctccctccctctctctctctctcctctctctcctctctctctctctctctccctcctctctctctctctctctctctgtctctctctcccctcccacaactcctttccaccctacctgcccccctcccgcccccaccccccaaacataaaatctttcaggaaattgccacatctctttagcctgtggtttctggcaatctgtatactactattgaatctttgttttacgttgaggacacagacagaaaattggatctttcctttatccaagaccaagttttgattctttcaatttaaattgcaagcaggtgcctatggagtgaaaacctcagtgtgagatcagagccaaaatttatgtcacacagcagattacattgctcgaagaacataaggcatatcaccccttcaaatgtgcatttacctcttagtcacaaagaaggggatattttagacctccaaatgaaatacccttggtatcataataaatcaatgaaattattaaagggaactgtagacatgaattattaaaatattccacttaactatttttggaagaaggtgagggggtcatattctatttgagaaacttttaaaataagtggagctgtgttaagacttccatgtttgtaataattttaagagtttgggataaactgcattttgtcagccaatactacagaaagttctcttttcagtaggtgcttacaaaatggactttttcctagatgtcatctttcagggtaaaactgagtttgcatatgtatgtaagaaaagttaaaacagaaaggcctcctcatttttaatgacttcaactcctctatggttccttttggaattgctttttttttggtaatagaattaagaacactaaagcctcaataagtttttgagggagagccaacaacatctgtgcttggccatgttgatggttcaaattttacttttttatgaatgtataaacctaaacatagtaatcaattgctctgagtttgtcatgtgtccagttgtatggaatatgcttggcctgtgatgccagatgagtcttgtaatctggaagtaagctgtgtagacacaaggtcattttagtagacattctctttttatcgagtgcacttcagaataggtggctaggaagcaaggctgtcaatgaaaattgatccaaaccattccatccaacttctttatacgcactaaaacccaagtgctcatcctgaagaaatattttggttcttatctatttgtgatctatttttttctgtattatcaggtgatactcctcctccttgctgtgaaaaaaactccagtacttaaaaaaatataaaattcattatatcctccataccactagaggcctgctatgaatttctaagaattcatttaaatagcctatacgttaccagattttttttttatgtatataacagagaaaaacaaaatgcattaaaattagcttcatcttgacacttagttcagatgagctggtcatacataaatggaaattgttagtagttcaaagatgttgtagttaacttctttaaagaaacagattgagaagcttttgttgtagttaacttctttaaagacacagattgagaagctttccgatatcaaaatgtattcattactttgaatgagagttctttatttgttcatttgcttatatgcgctctttcatctgggaattttttcttttatacgccacgtcatacagatcccctctaatgcagtttctggttatattggtatagataatttattcttaagaatctagcagtatttggcagccctgagacatgaaaagcttctattatgaaattaaatttggttattttttcttagtctttcaaacagtcaattttttggattcttgcaattgaatttccagtgttttaaaaatgtatgagttaaaagtatatttgcagtaattcaccgtttctattctgatgattttagaaatctgaaaagttctcccattgctacatacattttctttaatgctatgggcttattgttrttattattattttttagatggagtctcactttgtcgcccaggctggagcgcagtggtgcgatttcagctcagtgtaccctctgcctcccgggctcaagcaattctcctgcctcagcctcccaagtagctgggaatacaggcacccggctatgggcttattgtatactcgtttgccctttttctgaattaggaaaaatgatctaatctttaaactactgtatgatgcatgcttttctctattgccattgttttatactattcttcattcagttcctttgcaaccttttgctactttcaacatttgcttggctctcattatgtcagtcctggagaaaatgacttttgttcttttgaaacatggaagtatgtaatatgatacattctggtggctttttcccccagaagaaatagatagccaagtggcttaattttgacattcaagctgatactcagaagaaaagtatgtctttgggttagtttacctctgtaaagcatataaatctttataaattattgccttttcttatttttgtttttggaatgatcatgtttcaaaatttaaattaaacacctggtgatggagcaaagctttgtttatttccataggacatctaggttttagtattatctttccagccttcctttatacctggagagaatgtgttgaacatcattaccttaacttgcccatgtcaagttagaatttcttgcagtttaatagattgtcttgatgtcttgatggaatgtttgagagacaactcactaaatgcttgtgtgtcaggttcagtgttggggagctgggaaggtgaagaagaatgagccttccaagagattgtgctctgaaggaaatatgtagtataagttatgttcatttatttagtaaatgtttaatgaatgcttcctctgtgttggacattcatcagtgcttcccaacaggacactattggcattttgggtggacagttctttggtgtgtgggaatggcccacgtgttgcagaacctttggcatacttgcccattatattctagtagtagtctcagtcatgcgacatcaaaaaattgtaactcccattccctgtgcatacttccaaatgcttctaattgaaaaccactgctctagatactgttatgggtatttaaaaacatgcgaatgtttgattttagatrgtttccacaaagggtttaaagcctcattaaaacttgtcatccttaccacttccatccacctcctccacttcctcatcatcacaatcacagttcatagttacatggcttacatcacatgttccaamtaactgttttatttgatcattccagcaatctagtgcggtattattcccattcttactgactagtggagataaaaaaaaaaaaaagaaaaaaagaagctggctaatgccagatccttagtaagtggggagcaaggccataactataatgcaggcctgagctttgcagtttctgatctgcagttcccagttctcctggggagcctggaggaaggcacagggcctggttgactcttgctttggccctcagctagccagcaccctgactcacatgagggtaggccttgttcgtgctggattctaaggcccatccaagcttttaccatctctctagtttctgcaagtaaagaacatttttactgtatactcattcctgacactgttcaccacttaaacaggtgccctgccttcccatcatcgcaatgccccaggaaaattctttctcactatgctttggttgtgtcttgcatggtcctatcacaaccagtaattacacatttattgatatgcttttgtactaggtctttctttgactacctctattataagcttttaagtaaaggaacaaggttatttttttccttccctgtttatctccaaagctttaataactaacaagtagtttgtgttcaaaaaatactttgtgactaggtaaatgagtgaataatagattaattgctcttttatcaggcacttcttcaagcatatcactgaaggagacatctttatatattttctgaagtcttaaggataattactatcatctcccatttgttcactgatggaatatttattgtggtggcctaggaccttccaggttctgttctgtggtgcaagtcatgcagcagtcactgctttcgtggagtgttaattctagtgaaagtcatgaattccactttctctagcaggtgtcatgattttcatagagctgccagtttttatgtttcctctaccttttgtgataacacgttctagaaattattgtccaaagaaataaatttgagcataaggctttcaattcatgggtcattccacatttgccaaaaggaagaataacacttgatgtagttaaggcatcttttgttgacactttgatttagtttcctttattaagtcatagaaagatgaacctagtatacctctttcctcttcattgttgctgagtattctgagcattttgatcaaagttctactaagtgaaaattgactggatctgttattgactgtctcatttctgcaaagataagaaaaagtcaggagaaaagagagtgtactgagaaacactggtgaaattagagtcaagacagaagaagagttgttcattattggtaaataaaaatttatcgttaataaaatttcctttctaggaaataaatataagtaagtccttctctgaaatatttagcacacctaatgaaatcttaaaccaaattcagtaagttcatggaataaaagattcaaggtccttcaacctcgttccatcaacaaaacacggacaacatggacaacaaaaacattctgttgaacaaaaaacgtggacaacaaaaacatgctgttgaattttgtttcccagaaatggttaaaaacattgcactgacatgtaagttggtgtaatttaccagagctttttggctatctggaatatatttcaaatatgtttatgaagtttactaattttacataccactgtgacctgcaaacaagtcaacaaaagttcagtagaaaagataacaatttacagtttaaatgactataatggagctaattgctcttggaggctcttaaggattatgtgtaagagacaaagttatggcaggtcatatcttttatagttcttaggagaagattgccagtgtsaactagtttgaaataaatttaatgaagatcatgttcaattatttctgatgtgtttaatttatgcatatatacataaattatatatatatgtatctatgtgtacacagagtgagagaggagcatgaaggtcacatgactgatccttgcattcattttgtccctggagatattttacttagtttctaaattcttatacaaattactgttctttagatacaaaagaatattaaaaactttaaaaactgcagcaacaatggaccagttcccatgctaaagactcagagctggcttatctctaccactgaaagaacatctgggtgcattccaacacaaatcagctgtgattaaatctgtgaaataatggcattaacaatgccacagaccagtgtatagcagctatgtagaaatggcatatctaaaattacctcagtggcatatccgaggatgcattataattgtatatctgaaggtcagtttcaccaaaaaccaacttagtaatagcctatctagagattaagtcctgtattttttaaattatgaaacataattactgatgcagcaaatgtgcctgtgatttatatgcaaagagcgtcctagggaaataaagaggatctgaagttcattatattatattatacttcaagataacttccttattcttgttactttcttataacttctttctccctctgaatgttgaagttttatattccttgacgatttttatcaaagaaatacctccatctgtgttcttgctctgagtggtcttaagcacatctctatacctgctttgtctgtttggcagtgaggctgtaaggtcagatgagctaatgcatcgtaaaagtgtcttgaaccccaagcagtattacaaatgaaatttgtattaatggttgctcctattaaataaatatgtgcctgcttcgtatttcatctgatctctcagtaacctaaggtagctactgttattatcccattttacagttgaggaaactgaggcatggagagattattaacctgcccagaatatcatgattaattcctggttgatctttctgattgttatagcagaactcttatccaacatcatggaacgcttgttgaaatgtacttgataattcagaattcctttttttcctaaagtttgccaactgcctgagtctcatctgttaacttggatatttagaaactacatagaaaataacttattttctcagatgaagaatatgattttcattaaagttgatacacttgtttattcagcaaacatttattgaacacctactgtatatcaagaatgtactttgccttggaaatacagagacacgaaggtttaaaaaaatctacattcaaagatgtcagcagattattttgttgttcctgtcttctggatctcaggatttggacagtgagctgtaatggraagattaatgatgttttagcatgatcttggaattagctatatagtagtcttttctagagatggtgaacaactgtgcttgctaagtcttgctgcttctggggcctgtctggagaaagtaatgaatgctttggctttgggtagyccattctcttctgggttctgcctaattttcagtactttttgtgaaataaatgcattccttcccctagtcttcgctttttaacccctgactcatcttttataatgcgaaagatcaaaatcttgcccaatttcagtttttgttttttgttttgttattcagcaaagttggtttatatgtgtcattgcattgatttttttttttaatgatacttaccagcatgcttttgcacagttcagaattttgaagggatttgtaaatgatgacctgacaggcaactttgagcytaaatcttgttacaggatttgatcagttttgtacttttccccttactttgtttcccttcctaaggcattttgtgtgtgtgagtgttatattctattggcaggcattcttttctacttctctttctctcccctggcccctttcctcccttaatacagaaataataggtgccacattttgtaaaaacaattcaggaatggaacaaatgaaaaataaattggagggaattggcattttaaaaatgctcagcctgcttacccacaagttggtatatttctctatttattcaagactttattatgaaaaattttaaacagacgcaaaaataagaataatatgatgtttgccccccatgcttatctctgttcatttctggattgtaccgtccacaaggagaggaggcaccaaatctccttcacaattgtagcctcagcttctgccataatgctttcttagtatttattgaatgaaaaataactgtaaaaagtagggttctgacttgaaagccaaggtatttttaaattctgctaaatttaagaaagtgttgggtagagcgggtttagcctatagcttctactttccttttcagaatgttcagaattaccacagatcttggaaacattcttgaggatgctcaaacaacagatttggtctctgcccatcagatctgtagctttgatggatttgaaactggtttggctagtttagggtcaccctgtgaaaattgttctcctttagtggggcactaaaaagagctcttaccctcaaagatcaaaagctatctggagagaaacataattgtatgaatagcattgaaataaaatgtttatggataataataattattggaaatattctcaaactttggccaaattttttcctatagaattgacattcatacattaaatcctagtggggacaatgtgcttctgtttttctatgtcaaatgactttggaaaagcctccttttataatttcccttttttaataatttattttttaatttaaatactcgatttctctgttttgcagatttcttctgtatatttatcaatataattcttattcttctcttatagttacgccccatggtgtccatcctgccagcagactgattcagaatgggaggcttttgcaaagaatggtgaaatacttcagatcagtgtggggaaggtagatgtcattcaagaaccaggtactgtgaatgttgcacataaaatgcaaaagtttaccgactttttattttgaatttttttcaagcatatagaaaagttgagagtctgggatattgattacccatgaactggccacctttaagtagcagattacattttttgcatacttggatctgtctttacgtgtatgtgtttgcacatacatatttgcatatatatttctattttttctatttttattttgctgaatcatttgaaagtaagttatcgacatcatgataatttacccttcaattctttagcacgttaaaggcttcttaattatttcccatgtgtctttttttttttttttttttttacagttttttgactgaggatccaatcatggttcataaattacatttggttgttaagtctttttagtctcttgcaatcaacaattatccctcattttttaaaatgacattgatattctgaaaagaaaaagctacagttttcctaggtgtttccttatggtgacatggaacttataggaatattaacttatacgagtattttctgcaaactgagagtttaggtgcatgatttagcttagacatttatggcaagagtacttctaagatgatgctgtgacttcatattacatctcattagaagggatatgctatcaccattagtaatgctaattttgagcacttggatatggtggtgacactaagtatctcaattatgaagaaaggatctcacattgtgattagcaagtaacctctgggatgattttttggggttttaagatccatgatgctcttgcctgaatcagatattatatttcactgtggttccagagagtgaatttctagttctgtcattctgtctacactgattagctgtgaatgatataagttttcacaagaatgaatcatttttaccccaaagagtggagtgatacagagacttttaaattctgaaaagatatatacaataaatttgtgtttgtagttttaaaacaactgtatattatatataaactgagaagaaaagatggccttttataatctaaatctctaaaatgtggctattttcaaattttaacagtcatctttttcattgacattcaatttatacctactgcatcctttcatccttttacaagggcaaaaagaagatgggtatagaagtgtagacattcattttctataataaactgtgagttcaaaaaacacttaaataatgaagtaccagttacttggataacagaatagatggtacatgttaaaattgatgtgtcagcaaacccgtggagcgagatttctattaaaagccatgaatcctcattcctctatctttgtaagcattgtcctccatctagagatggacaataaaagctattagttcatggttttggctgttataataagttaattctgtttggaggctaaatcattgcagatgcatttttgccagaaacttgttttcatctttagagtttaagtaaactaaattcaggcataagacttgttaattactgggcaccatgcacattttatgatgggtttcttaaaaatgcagctggtcaatttgcatttcagtaatttggcacacctgctcagaatttatagcataatttgaattaaaagaattaaacagccttgtgatgggttcacaaatcttatgtttaattaaatatagtctttccttctaaaaatgtagacttacagttatttttaacattatgaattgattaggttttcttgataatgaaataagagagaaattgattttaagaaatatttttaatacattcaatgttgacttggttttatgtatatctgaaatatatatacttgaaatattaaaagaagaaggaaaaacttctggtattctgtaggaatattgaaaaaacaaagtctaataaaagattattattttatgtgtttgaacaattttttataggcagaggctctagaattattttaaatgataaaaattttaaaagtgcaactcataaataaaaattaggagataaacttctacatgcatgattatttgagagacatagaaaatatttcatttcatattatactgttttaaatttataattttactttgaattacaaatttaatgctttcagttaatcttttaatagcgattagaagtaacgtgtttattcaacaagtatttgagtttctaccataaacaggccctgttctagataccagtgatacaaaggtgaataaggaggacagaggccttgctcctcatggagctgcattctagtggaggagataaatagtaacaaaagaaaattggcaaataatgtcagatggtggtaagggatatgaagaaaacgtaggataaaaatgtacaaaatgattggagctacctcttaagttaggatggccagggaaggaccagagataaataggtttcaatttatcaagacctgtttagccagaggtcttgataaattgaggaagtaaatttcaaaaacctttgtgggaggagcattccaggcagagcaaacaccatgtgcaggtaggagtgtacttggcttatttggagaacaataggaccaccagtggagtacttgagataaatggggatggagaagtagctagggaccacaccctgtgaggtcttgttggccatgacaaggagtttagattttctacaaagtatgatagggagctactggaagattggagcaggagagagatatgatatgatttatattttaaaataattcctttggcagctatgtgaaaaaattgactacaggggatcagaagaaagcagggagaatggttaggaggtaaatcagtagtccagagttgagaagatggtggcttggactagtaacagcagtgttaagtggtgggattcttgagatactaggattttctgatggattggttgccagatggggtggaaaaggagaaaatggagaagactgaggagaagtaggtttgggacaggggctaagtttgggatgttaaatagatatccaaatagagatgaactagagatgtaagtttgaggaccatcaatatacttggcattggagctagaagaaaaattcagattatctatgatctgtatgtgccagagtcgtgagaacaggccactgcaacatttagaaaaaaagaagttgcagccaggtgcagtggctcacgcctgtaatcccagcactctgggaggccgaggcgagcggatcaacttaggtcaggagttcaagaccagcctggccaatgtggtgaaaccttttctctactaaaaatacaaaaaattagctgggtgtggtggcaggtgcctataattccagctacttgggaggctgaggcaggagaatggagaatcgcttgaacccgggaggcagaggttgcagtgagccgagatagcgctattgcactccaggctgggcaacaagaacataactttgtctcaaaaaaaaaaaaaaaagaagaagaagttccatcataggagaaggaacttctcctatgagaagttagtgagatagagagggagaagtaggagggtctggtagccaagtgtagaaagattgtcttaatgtgatactaactcactggcaagcctccagggcagtttgcctctatcttggaagcagtttatttatttactttttacaaacactaacgtcttgaatgaatagtaaaaactcattgaaatgatattatttttccccacagttgagcactttactgtgtatttctgtatacaaatttctatttggttgcagatcttcgttagtgtattcttgccttgccacagaagtgctagtaaggaataatttcaattctttccctgtaagtaaaatttaaagaggggaaacaataattttgaagtgtcatgcatactctttagttattcttataactcttccatcagtagatctattaagatattcttttaagtattttaagcaaggtaagatttcagatttatcaatgaaacgagaaaagttcccttctyccctcacagggtgtgcgttgggggtgtggcttgcttctttgtgcccgctgctcaaacctctagggggacatgcagacgggcaggctgtggggctccgatcccacggcagcataaaggggtgaatgtttacagctgaagccccagtgggcgtgtgttaccgtgtgctctttcagtttagccatccataggtggcttgtgttcgtcagctcaattagacacccccctgccttatcacagggacagagggcttcttgccttggtgtaccagaagaatcggatcacatgtgggcttggagaatgagtgcaaggttttattgagtggaagtagctctcagcgaggtggatggggaggccagaacggggatggagtgggaaggtggtggttttcccctggagttgggccacccagcggctgggctgtcctccaactaccctggccaaactttccgttgttctgcgggtcgacttgccagtgtctgctggtgtgttcttctgctggtgtgctcctctcaatgtcctctcgatgtccagccgctgtgtgttcttctgccgatgtcttcctcttgactcccagctgcttgtttgtgtgcctgctagagactcagggtttatatatgcacaggatgggagcatggcaggccagggtggtcttgggaaatgcaacatttgggcacaaaaacagaaatgcctgtcctcgcctaggtccatgggcacagccccgagggtggagccctctccaggggcccatctttcccctcccagcacttccctgcccatctccaatgtcatcaaaactagagactataatcatgttgcatttttatggctgagatgtagaagccgaggaaagggcagcccttagattaggttacattacattgcctgtttaatactgcrtagatcaggtgatgtgtcagttgagttgactttgggaaattaaatttaatgagtatatacttgaaccttctgttccatgcagatgagcttagttgtcaaggtcaggaaaacagcagctgctcdtcacccttgagtgatggctatttcactagattagaggtaagccagtctcctgccacagccaagtgtaagcattgtctttaaaactactgattaatgcagaagccaatttagtttactgtactttagtgttatattttaaattttataaatgtaaattttatcttgttttctattatgttgacaaccttatttcaatctcaaaagtaaggttaattctcctttttttcattgtgttttccttctgctaccctctttgttgataataacaacatttagtaagcatttacttcagcctgtgattgtgctatacacttacatgcattttascttcataacaaccctgtgaagaacaaactgtttatctctgtcttactcagaaaactgaggctaggataggtttagtaacatgacaaagataacatgctaataaatagtacaacaatggctaatagatagctattagctatctctgttttcttaatactgaacctaaataatttctgttgtgttttggcttatcaaaatgtaattctcttccataatttttttctttctctaagcttttaatttttctttcttttgctgcatgtgtttaagataaggtttctgatacagtgttaaaatctgtcctgcattctctgtttgtgcctacttyatgttgtgtcacagtcttcattttaaagtggaagttacccttaaagtaaaaaaggcatgtagaaattttggaaggctttgtggcctaactttatcctttttactgaaaagcttaggagtatacttgtttcttccaagcttactgaagttattgcactgaactattatcctgagacaagctgctattatgatgttcaaattctttgtcaagatccacatttaacttaatgttattaaaccctgaagccacaacctcagatggtgcttctgtattccaagtggtcatgttttaattttcaggtaatgaaaattttcctggacacgtcatagaatcagtgttaaaggttagaagacatttttggagtactgagatgagacccagagttttcggatgtcttttagcctcccagaagttacttttttttttttttgagatgaatttcttatggtgttggatctacagggatttagtagcgtgtcatcatccaaggaagacttcgactgttctggatcttgttgttgttgattttactgaatatatcattatatgacagaatattattccagacagcaaactgaactcgtgtctgagttgggtgctgcaacctcattgttaatattccacataggctgtcatttgaagaaatattgacaaacataaatgaaagtaatcttgaggtgatatgatttattggtctttattttaataaaccttaattgatggccttgtaaattggtacagtagtcagtgaaacaacatagcaattcatatcaagagacataaagttattataccctttaatctagcaattttgggaagaactctcctgttattccttttagccagaaccagaaagatgcagaaaaacctcagagaccatctgtgactttgatactttttcttggtactcactgattttcatgagtacatttatttgtaaagataatttatgttttctgaaatgaggtgcaatttctaaaagacttaagactaaagcctcctgaatctggaaatgttttatatattgtataattaaatgtgttttatgaaatatttttctacttatttatttacttctttatttattgtcatagccagtgatgactaagaacatacaaaagagcaagttaaaaaatcactttaagtgatacctaacatttaatagaaatcttgtctctttattctgataaaaataaaatctaagtaaaaaactttaagaggtgatgagatactatttaatttcttcattccattttaaaaaaacatacaaatgaaatatacattcttaataccgtaactgtctttagataaaatttttggctggtcataaggaactatagctaggtaagaagtaatgtatgaagctgttcataataattatcttaaaccaaaggcatatactagttttttaagtatttaggaataacagtactttttcccctggcaagttagaattggaagtatactgtaggatacccttgttccctccagggtgaaatcctgagcaatgtgagagatgaaaatgcgcttagaagtgcttgttacaatcctcagttgacctatttttgggtcactcgtgtttatgttactggtgacaaaacttttttttccaatgtacaatgacaaatttttgtagtaaatgtttctttttgtgactttgacttttactaatccagagcattgtgtttccttttaaatacaattgagatgttttggaatccacttggtctgaaatgaaataaaatacagaattctttgagaagacgcatcatttgttactaaattatgttgaatatggatttaatttataaaatgggtgaaagtaaattttccatgttattaaaagtaaagcttcagtgttttgaattgcaagttaccacagggatgtgtgatttgagcaacttaatttgaatggatatttgattttgtccacattgttctacagtgggaaaggcagctgtgatggaaaatgttaaaatgatgcctctgtcatttttccatgttggccaggaggatccttaagctttcattctctttacttattcytggtgcccatgcaaatattatttatttgtaacatttaaagggcaaggatctgttctttactcctagtctcattcagcatttttttgcatacctaccctttttttaaatattttcattctctgtttgtggttgtgattgtgattatttgaataagttatttccttctgctactagactataagctctgtgagaataaaggttgtacatgtttttattcatccatgtgtcttgagtggtaaccacagtctctggaacaaagaaggtgcttggtaaatatttgttgaggtactaagggttttatttatctttgtctttacatgcacataacatagcatttgatatgtacttagtgttcagtaaaggtttgctaaaacaaattggaaaaaatatttttcacatacatatattccctttacggtacttacagattttataaatgtacaaacattatacatgatcttaatcatttcatattacttattctttttaaactgataactgatgtaatcatacctatagtttgttgagtccttcactatgtacccagcaccatgctaagcctaataacacttgccctaatctaactttagaaccattaagttaggcttttatatacccattttatagaaaaaaggtgactgagactaagaaaggttaaataatctaaagttataaagttaataaatgggtaagtcggtatttaactttgcaaaaccccagtttgcatgactctaaatcctatcctttcagcctccttacaatccaagtgatgcaagttgtatgtcagttactagaaagtgttaggtaataaaaataggtagaaatgaaatttctgtaagtcaaaaaaaatagtaaatgtragtcaacaattgcagtgattttaataatgtgattatgaaagtaagctcaagaatgctttttttggaggacttaagtgtaacttttgttctgtttatgcttcttgtaggtttgagtgrccgcttctttgtcaccactctcccagcattttttcagtaagtttaaataatcttctaatcttgcaawtattagaaatcaatagatgtgtaccaggaattctaagttgtcttccatgactgccactcattcagcttaacatgtgagggaaacaaggctggtgtgctctgagtgagagctgtgacaagagaagctttcctggagtgctgcagagacagaggtcctaatgtcaggcgtaggtgggcaggagaagtcagagatttctctggtgatatcagaggtggggtaattcttaatatctaagtaggaatgcattaagccaacaaggtagagaaagtctttccagttaaaggagatagcataaaaaagcccaagagagaatgagctaccttttgagaacttygaactagttctttatggctggaccacaggtatagctggatcatgctgagtgatgaggccagagagactcaggtacaggcaggggaaagataaagaaagtagtgaattccagagatacttaggaggtaggatcagtgggacttggtgactgattagctgtgggaaggaagagtctatgatgactaccaacaggccatgtgtaactaactagtaaaagctattgcctgccttcatgattaggagccattaaaataagaggaggtttggaagatagagacaaaaatgcaaaagataagtgtgacttgcccttcccagttccaaatggagaagtctaggtacagtttgatgtcaggatccagagttcagaagaaagatctagactggagatacatattgagaattcctcagcattgaggtaaaagttgaaatatatctagagagaacatgtatggtggggaagggaagcaggtcaaggatggaacctgggattggccaacattaggacatctgcaaggaagacagtgagtgaaggaaatggagaagtaatgctcagagcagtaggaagaagtccagagagctcctgtcataaaagccaagcacaaggaagaaagaagtggtattcagcagtgaatgaacaatgccagtaacaggtgaaggaaacagaaatggatacggcacttaggggtcattggagacccccartatgagtggtttcaagggagtcctgggagcagaacccccagttgcaccaagtagtgaatgagacataaagaggagaaaacagcaagcctagactcttccctgggggccctgattgctgcaagtaggtgagagggaggccaggttgaaggggggtatgacgttttttgttgatgtttgaggagagggccttgaacgacataaatttgaaaatgtggatacaatgttttaaacttgataacaatggctgttttgctattgtaagagaaaaagtaattggtagcaaaaataataaaaagtaacttggcatattaaacactgccaagaactctgcttttagtcacactttgtacggtgataacatagaatgttaacgcttttaggtttgaatttctcacttayagtaaagcttattaactctttctgatttatstctatgtatatttttcaattgagtcaatttaaagttcagatggcgttcagatgtatcaccagtagctattttaatttttattatctgtaacatcgttattttaatgcatttgctttctacttgttttcataatttatagtgcaaaggatgggatattccgccgttatcgtggcccaggaatcttcgaagacctgcagaattatatcttagagaagaaatggcaatcagtcgagcctctgactggctggaaatccccrgcttctctaacgtaactcaattttttaagacaaggtgttactaataaaacaggaggttttaagttaatagcctgtgggtctcaaaaaagcctatgttttwcttcacatttacttccaattacccagattactcatggccatgcttagcccatgcagtatttctgattttgtgacctacatatgtttcagctggtttttagtatactgggaattaagtagccagatttgagtgggttacagaacgcctcttttccagcttttacactaagccacaatgactatttttctctttacaaaatatggtattgaacatcatttaccattctttcttccttttaagttattgatgagacagaggaataactgtttattgaattatagtttatgaaggaattgctattatatattatgtggaaaacaaaacctgtggagtctttggctgcctygcaaaataccacaggggatagctttggccttgacggcaaactgtataatacttggtgaggtagattaggccaaaccataacagctttttccacagttggttttagttttgaatggattgtcatatatatagataattttatgttagtatatacaagtgtaagaaatttccctactgaaaaaggagcaaatcaagcaatatttcaggagtaaatcatctagtggcatctatattaatattaaggaaacacatagcttactctaaaaacaactctcacatttcattctacaaccatttgagcactgatttagccagatactttcctaggtgctaggtattcaacactgaacaagacagacattcacctcaggtacagagaatcatagttgggatgagggtggataaaaaacacaacaacatattttacaaagatgggatagctctggggttatggacctgctcttctagatggagggagtaggagacatttctctgaagggacgcctctaggtgagatctgaatgatagaaggaactagcttaggcaaagagcagagggaagattattcccaggaatgggtatggcatatgcataagccccagtttggaaaggagcttggtgtacttaaggagcagaatggtgaccagggtcaagcatagtgaaagggaatgtaggatgagctgagtaagaggggcaggctgaagccaggtcatgcagggcctgtggccacaggaaagaagttggaagtgatcagcacacacaaggagaaggtgacccttaggagaggagattggagagggcaagaatggatgaagtgagttgaggcttagagtggtagcttgtgtcaggtggcagcagtggggatgtggggatggagaggctgagtggattttaaatatgttatgaaggtaggcttggccaaggtgaaggagaagaaggattcattaataaaaacttacaagtttctggtttgagtacatgatggatcttggtacttgttattgccttgggcaagagaaaattaaggattctgtataaatcttgttgggtttgagatgcagactttgtagaactgtcacagtggatgctgtattagtccattcttgcattgctataaaggaatacttgagactgggtaatttataaagaaaagatgtttaattggctcatggttctacaggctgtacaggaaggatgatgctggcatctgcttggcttctggggaggcttcaggaaacttataatcatggtggaaggcgaaggggaagcacataacatcacatggccagagtaggagcaagagagaaggatggaggtgccacacactgttaaacaaccaaatctcctgagagatcactcattatcaagagaatagcaccaagtggatggtgctaaactattcatgagaatccgcccccatgatccactctctttccaccagaccccacctccagcattagggattacaatttgttaggaataatgcttacaattttaagaaattgaacacttgaacaaaggatatttagcaaagcaattttatttttgcgcagagaggtgcctttttggccagtcgccatgagagcacacttgaacaaaggagtacgagagcctttatttttgacgcaagtcttgcccctgtatcctttttttattggctggggtcaggtgtataaactaattttagttggctaaacatttgaatttttttagataaggtgggcacatagaagaaagaggaaaggggaaagggtgtctgtagtgagtcagaaagttgtttttttttttttaaataaggaaaggaatgtgagttggtactgataatggctggtattgtggcatgcctgcgcatttaacaaaggcagaaaggaaaaaggaaaaaaagagggggtggttaactctgaattaaaagattgattaggctatttgaagggaaaccttatcatatctcacaaattgaacatacgatttgggtggggatacagattcaaagcatatcagatgcatggaaatgggtccccatgaagaattcaggaacacaaaaaaacctacagacaatgttgaggtgaggggaacacctagaaagaaggaaaaagagaagagtacttggggatgagtcatgggccacccccaaattaagaaactgtgttgagaagtcagccaaaggaaactgaaaatgagtaccagagaggcaacatgaaaaccaaggtctgccattttccagaagccaaatgagtgttcaagaagaagggcgtagtctcttgtatcccatgttactaagaggcgaagggagatcaggtctgagacatggacattgaatgaaacatggtgaggtcatcatggccttgacaatctgttcctgtagtggtgagggtggaagccagattttaatcgattaaaggtacagtagagaagaaacagcatgtgtagagtaatctggagaaatttatctgtgaagctggagggtcatgtgaggtccagggatactctttttaaagggtaaaagagagtagagcatgttcatatgccagtgagactgttctaggagagagagagaagttgctcgtgcaggaagggaggatgagagaaagaaccaagtcctaataagacaaaatggataggatccaaggcacaagtggaggaattggactgtgataagagagttagacttttcctgtcataacaagagaaggtggatgcaggtggacaccaggctcagatttggtagtgggaagatgagagaaagcacatggtggcttctgatttcacagtgacatatgaggagtgcttgttagctgagtacatggggatgggaagatgtgtacgttttgaagagaaggaaaaggaaatgagctattttcttagagcttagaaagtgctggacagtattacgtgtccacttaggtttgggactatgaagcagaaagaactgtcatctggttatgtgatgttttttccctggagacattcagctgctcagtgttgagatttttgccgggtaggcacaatgaaaggagaaagggccaaggagttggaatagatttacagcagagtgattcaaatgatagccactgaatctaagctctgtaagaacagatatgaatctgggagagggggcaatatttagcaagaagtggagggaaatagaccagtcctcctgacctgattttcattttttttttatagtatatatgatcactgtttcttctctttatttttttttaaggatgtctggaatggctggtctttttagcatctctggcaagatatgggtaagtaatcttaaataaaacgtttatatttgcagagaggttaagaataaaaatacagcttttaagcaataggaaaacaaacatttataagtacatttataatttcactttttttcttaagccatgcaactactctcatgtggggtttccagtggtaatgtcgtcatgtagaagggcataatctgaacagtaacctgtaactactgtgtcgaggtcttattttcttaaatcagtggtgaagtctttcatccaagcaaaacggcttatgtgattttactttatcttatgtatttctttgtaggcatatctccctacaaaggaaagattgtctaagactgaaagtagttctgtatgtcagggattaacaaactctagcctgtggatgggctacctgtttttgtaaataaaattttactggaagacagctacatttattcattacctattgtctatgactgctttcatgctacaatggtacagttgaatagttgtgacagacacagagaattgtggttcacaagcctgtaatatttacaatctggcctttaagtagtagacccctgctatatgtgatcgtataatttctctgagtcatttcagtgggttagaactgttattcaggtttaatttttgaaccattatataatgttgagtatgtcccataaccttttatttcccttctctgtaggggaggactaaatccaaccagattgaacaaaatggctctggaattaaatatagctcaaaatatttcaaaaagtcttagaagcgagtctccctatatatgtcttttctatgctatgattgtaggttatggtgtcatgtttggaacataatattcaaagagtttgtgaagactctttttctgtttctcatacacattcatatatgttgaaagacatttaagaaaaaccttttgtattccactttctcagttccatttatattctgccttgtgagatagaatacctaccacaaggttttttggttgtttattttttacaacagaggcgaattgaagacttggtttcagtctttcaggttaaaatttaactttttttggcatttgtctcacaataaacaataactaatatttccccctctccagatagtttgaatttcatgtggtttccttctgctgctttcttaacattggtgagaactttaatcaagggctaagaattatgaattgcaaactgggaattgaaaagagattctgccttttgcagtatgttgatattaaagactgacaaaatcatgtagcctgatggctgtttgagccgtgtagcattatactgtctaattcaacagaaaaattggagtagatggttgtcaggcagcattgactgtgaaattttagcaccaaacctatgataagtgcaatagaatttgttctgcaggttaagaagagcttagatggaagctgattatggccttcattgactgtaaaagagaagttttactttcaaagacgatagcagggaagatacataatggccctgacctcatatagcttgtaatttggagcttagacaaacaagtttaaataaggagttacagtttttcattatgtcatgcagatgattacaatgtgtaacatttagagtgtgtcaaggccaggagtgggtgttttatctttgtacacacagtgcccagctatgggcaacacagatgtattctgtgtggatgcattaaactggagagaaagagccgtttggagaacagaatgtgatccatgtctgaataactaatgaatatgtttttcttaatgattgagaagtagaatatatatgttatataaatgtrtatttataatttccagatatttccaaaaggaaccaaaaatgatcattttataagataaactaaaatttggcacacaagtaattacattttataattgtaaaatgtagaatgcaaaatgtacaattatataaatgtataattgtaaaatagttttatctagtattaataccatgtgttttcttttttataagcatttgcatggagtaatttttctattttcaaccttttgattatgttttaaataaatcttataaaaagtatatagcaagatataattcttttaactgatgaatttaatccatttatatttattgggatcactaaaacatttgtcctgattgtagggtgtgtgtatgtaggggaatggaagagagttgcacataaaagaacgcaaatgatacagtgttattttgatctccgtgtgtgtgtgtgtgtgtgcattaccttaataatttgtgaaatctgatactgccctccatatcagcatgtagcctccccaagcctcttgccaacttttgtgatttattcttagaaataagtccccatcctttcatcagatctgtaggtaggtctcttgccacctgtgtttctagaatgtggcccttgtcctctgatttataaggcacaccatctctgacctaaagagacccagtccttggctacccatcaggtctctggtccccactcccacctttagttatggtcttgccttcctgtctttatagagccacttactcagcgagtccttccagctgactgccctgcctgctcagttagctcatttagctgactcttcctttagtcagagttcctcaaatccatgttgaatgtataattgtggcaaacgtatttgttttttaamtcatgtctagatcatatgaaactacaatgcaaatatattaataatgaacagaagaaacaactgtacatggtgagacagaaatagactagggatggaaggtggaaccaaaaaagtgtaaagtctcagagaaagaagattataaagatggaagaaggaaagacgtagaatggctaatgccagtgagacaagattgtttatgcctatccatagtctctttatctyactgaaatatctggatacatgtacagatagaaatcagtctttcctcagcaacagtcttccctggatgggtagctggttagatgtaagtatatctgcagggaagatgacaaaacagtataatggatgtttatatggcgtttttgtgtgtatataggaaaatgcttagagatcaacagtagttttctctgatatgggtgatttttaaaaacgttttttctataacttctattttcttctgtaatgaaaaaatgaaaacaatatatttagatcagagcctattgagctagtaattatctagaagatatctagaagatcagagatatatctagaagatcagcgcctactgaattagtgattccttaaggggcttgggtttctttctgccttaraagtgaagccaacttgctaggttgcacattctggagataaaagctggtcctcaagattctaggatcacctggtgatgagacactcacatggccgaattcctatcaactcaggagttggtttggtttgcatttggccttcttaacttcataccaacctcccctatgttcttgcttgagtaaactgttgaggtgagaaagtcccttgaatagtcttatgaggcagttcctgtcagcttcctgctgttaccctgaatcccagggatcctcgatatgtcattcataccacaatatggacaagagtagatgatctccagtgttctttccatcactaaatttaaattttctttccaattcactcatgatggcgctcacctgcatattttaatttttatataaactcacagaagtaattacctcattagctgttaatatctatcctcacaaatagtctcaacattttacccatctcacagatggagtcactgaggcctaggagatgggacagttagaggagtttctcagagagttgacatcttcaaaggacaaaattgattttgattttatattatagtagcaatatccaatttctttaaaattgtatgcaacttagtgactaaatgaaaaatgttaatactctaatggatagtacaaggtgaggtgaatatcataaaagcaatgtgcagaagattgaacttcaggaagcatcactgccaagtctggtggcatagttaggattagaagttcttgggttttgtgtgtggcacatgtgtggagagagactgtccagtcttctgtcttccctcttttcacagttggctacagtgctacagagtggcactatccttctcttccagaaacacatcattgtttcacaccttatgtgtaggcccctgaatcctattttttttttttccagccatagacttgttcctagaaccctttgagtgcctagtgcagaatctggtacctagttaatgtgcttgataattgctttttgttagttatatgtattaatcattattgtcttcattattttactttttccttctctttatagccaacgtggaatactttaacttttgttaatttttttagccaatgctgatagcaggcttaaaatagggttccgtggcagttgctcagcatataggttgagcatccccaaatccaaaaatccaaaatccaaaatgctccataatctgaaactgtttgagcaccaacgtgacacttaaaggaagtgctcactggagcattttgaatttccgatttttggatttgtgatgttcacctggtaagtgtaatgcaaaaatctgaaaaaatcagaaatctgaaggctgtctggtcccaagcatttggaataagggatactcaacctgtatatgcttttgcgaactaagtttagcatttaaatgtatttaaagcattttttattggatttgttgaatctctgctgctcactgataatataggatgtaacttccctttcctaaatgttactgtcgttttgagaggatgtaggcatatggcagattttagctaaaataagatgtgctacatccttgggaggacaatctgtgtgatggatgctaccttccctttttattagaatgacgtgacagaaaacttaaggctttatttaaaatatctgatgatgagaattaaaagccatgaacatttagactagagaagaacaaagtgtattttaaaacttgaaaacattcttctgtgatttacatagcatgcctcttctcaatgtttttttcgtataaaaatgtttagaatgttttgtagaatgttatagtgagacagtggtgcacatctgtaaggtacctttcatagatcctacaagaggctgcaaggttatgttttgttacaagtgctaagagctaaagcatgaaagaggtgaacccttggccatcattgaagagtcttttctagctgtttccttgcagggaagatattttggggattctgatctgtgtctgaaagagataaagggcttgttccagaactcctcagagagtatatcctatgacacaggtgaactctaaatccaaaggctctctgtccttcagggccagtctaggtttgaatgagactctgcaacactgggctggatgagtgggtgtgactaagtagtatttaatccaacctgcagtagtttagacttccagagggagtgcttgcctttctggggagggaaggctctacctcagatgcatggaggccttggcttggctgtcttccttaagtctgtctgaccactgattagaatgctcttctcatttattctgttgtaatgatgttttaatttcatcttctcactcaaatatgtatgtagccaaaagttagctctaacttaatcatgtactatgatagtataaggtgtcacacccatcagatgacattttagtgcattttcagtgaacagactaagattttttttttttttgaggcagagtctcactgtgtcacccaggctggagtgcagtggggcgatctcagctcactgcaacctccgcctaccgtgttcaagcaattctcctgccccagtctcccaaatagctgggactacaggcgcctgccaccaagccccactaatttttgtatttttgttagagacagggtttcaccatattggccaggctggtctcgaactcctgacctcgtgattcacccgcctcggccttccaaagtgctgggattacaggtgtgagccaccgcgcccagcccgagtaagatactttcttattcatctagtaccatagtataaggtatcatgcccatcagtttacatttttgtgcattttcagcgaacagcatgggatatttccttgtggtaagcacatataatattgaataaggatcagtattttccacaagtgaaaactgtcactttgcctggtagttaaagaaacagaaacacaatgatctaaaactgaattggattttatttaataagctattcctttggaaacatatataaagcaaaacttcaaggacatggtaccactaatcctaacactcataaggggctttaaagctgttgtagactcagacaaagtagacagataaatatttatatctgtagttgtgaaagtacaacctgattaatgaatagttactaataatgacctaaaagaccagaagatggcagagtttctccaagaaactcaaattccgttaaagaggaaattgatacaagaaaattgaagtgcagcttattaaaataagaggatgttttgaaagtactaagtgtttgagtcagaatgcaatgcttcaaaagcaaatgatttaatgaaatttaaaaataatttagaaagtttcttgagagttgcattaatcatttattttgcagaaagggcatgagatactgtatagaaggacttaaaactgcacattatttttcctaaccatatgagtaagataaatcagcagatacttataaagcaagttctaaaatacattcatgggttgacacagaggcagattgactttgaccatcttctaattctttggcacatttccgggtttaatattgatgatactgagtcctccgagaaaagcataagcttaatacacagtattttctaaagtaggaaactatacagtaaattttaaaactttctttgaaaagagtttgaatgaaatgatgttttgatatctcaaacacgccttttgcttgctgagttgtaaaatgctaagttactttttttttttttttcttgagacggagtcttgccctgtcacccaggctggagtgcagtggcgcaatctcagcccactccctctgcctccggggttcaagcaattctcctgcctcaatcccctgagtagctaggattataggcgcttgccactacgcccagctgatttttgtatttttagtagaaacagggtttcaccatgttggtcaggctggtctcgaactcctgacttcgtgatctgcccgcctcggcctcccaaagtgctgggattacaggcatgagtcaccgtgtccagccaagttactcttaataaacagttgtcctggctaaacacacactgatgaccagtgccatcaacagaggacagatgccagctttacagtttgagagtgtgtttgcctttcgtatgaataaatagctcaggcatttgatgcatcttttccttattcaacaaatactgattgaacactttgattccatgtgtcagtgtttaaactacttgctgcgtctttagctctatctcttctgctgaataagaaattgtagagagatatttcagattttgctaaatcagtttacaagctttgttctttatttatcattccaaattaagccagaataaaatatgttttttaattgcattgacataaactaagaaaccaatgggagtgatttagattttgagaaataggaaattaaaatagaaacttggactcattttcatcaaccttactggttctagggaagtcattgtcattacctctcttgctgatgatatttggagccatatcatcctgtgtccagtagttacttgaattttaatggccatttttgaagctgtcagggtcttgaacaaatgactaagtgattgtgaggaagcatggctcctgcaactctacatctaagtaggttttgactttgaaatagcaagttcatatctgttaatttctttatgatttagcatgtaaatactttctagctgtgattatgtcccttcactcatttttagagtgtttgtcatcaaatagagtcttagggaacagtaagcatgaagggatatacactctattcaaagactgctggaatctcatttgctcataataaattaatcagaaaaactttcttctgtctactgttacattttatgttttctggtaatttaccaaactttgaaaggatgaataggtgtagagcaatgagagtctaattaggaaaaagaggtatggagacattttaaatgattgacgttctgtaagtcgtaatttagttttactaaaaagtcagaggcccaaaaagtttaattttttcatgaatgccctattataagtaaacattgagatgtatataattattaggggaggagggccaaaagcatccatcatgatggaagaaaggactatcaaaacgattctaccagaattctatccagattatgaactctaagcaagtataactttttttttagtaatgaccttaattactactctcagtttcccaatattataaaattgacttgttctttaagaatcatttagatacataaagctttgtgggaacctatgtatgtagaaacaacagctagagagagagattgaaatatttttggttctcttaaaaattaatgttttattttttttcttctgattccagcatcttcacaactatttcacagtgactcttggaattcctgcttggtgttcttatgtstttttcgtcatagccaccttggtttttggcctttttatgggtctggtaagagataataccaaactttttctatctttaaggcaaaatgaatttcatgtacaaataaaaggcagccaagaaagaaaaagcacataaaaaatagtattttgtgcaatctaagtagttaaatagcatttgcttgtttgagactgctttcaatggtaatgtgagatataacagaaaatttattaaattcttatcccctaatcctatcccttaagtattttgaagatgtgtactgcctatagacagtaattaaaaaaaaaaaaaaaaagagaccttactagaattgatagtttctaagacaactgagtcagctgtgatttcacacattgcctgcttaattagaaacactgtagtgataaggccaaggttttgaatttgttccttgtgtagatgcaagattgttgttgttgttgttcttatcctccagttaaactaatcctgactagccgcttatgcatacactctggttttcctgagatagataatgtagttaacacaacacaattattctttgggcatgaaaatcagtatgcagtatatatctccccaggtattttctccccaggtatttcaggcaagagttgaataataaatttatttatctaactacataggcaactataaatgttcagcatgttgtacttcttgttattttttatttctcttaacctaatcttgattagtttgattgcattttaaaccctaattaaaccaaaaagtttttaaaaacctttatattgtatactaaacacatagttcctaaacactataatgggaataattgatgattactaaaaatttatgtcaaagaacagactttaaggtaagattatcttaaagtctgtccttatattttataatgaattttggctctttagcaagttctttttaaaaatgttaacaattgacttatagtaagtcacaaccccargaggccaaggaggctcgatttgacttttcyatgaacatgcttaatacatatcatggcttatctttgaaacttggctcctgatgttaacttcagggataagaatgggacttacttagatatctgtatatgtccttcattaggtcctgggtatgttctgttctgttgcattaatctttttgctaattaacatgtccccattgctccygtctaaagggatttgacaccggatataaatagaatgtgattgtctgtgcttctcccatctgttgtctggtgcgagatttttctagcagtgtattttggggctaccatagtgtgaggttcttgtagggggaaacagtatgaggtcccaggcgagtcaatgatggagttatagggaatgtaggttgtgtgtgaccctgttggaagactagtgaaaatgcttagagttttagaatattatttttgatgttgactttaagtccatgaaattgagtcaggcctgcctgcctatgccttagattcctttggaaacctagattcagataatcagtgtagaaaggttattggaggcttggcctgaagaaaggagagagtgattctagcctgttcaagtgattaagtgagatagactacccttccttaataagaaaataactttatttaacaaaatattattaactttattaacgaaataataatttcaaagcatatgaatcataaattataaaagattcatacatttactgttaataagtttccaaaaaataacaaacacatatctgtgttcaaagtacctgttttaggctgggcacagtggctcaggcctgtaatcctggcactctgggaggctgaggcaggtggatcatttgagcccaggagtttgagaccagccttggcaacatggtaaaaccctgtctctacaaaaatacaaaaattagcctggcatggtggcacacacctgtagtcccagctactcgggaggctgaggtgggaggatcacttgagcccaggagttcgaggctgctgtgagccataatcttgccactgtactccagcctgggtgacagagctagaccctgtctcaaaaaaaaaaaaaatatatatatatatatatatacacacacacacatatatatacacacacacacagaatgccttttctataactgttaagtatattaaagtaaacacacaactgctagaatttttgcttttagtaacctttaatttcttatgtactttcaacttctgttttgtgagagttacacaatttgaaacagctgcattcttatcccaatttaaatcacctattccagaatggcatttttgttaacttctaggatgatagaaaagtgtttgtcaattgttttcatgtcttagccacatagagaatatttacgtagcatgccagggtaaaggaatactgggggacaaagctgcctgaggctggctctgaatggcccagactccttgaaggatgacatgtctgttgggaagctaggatccaaattttttttttttgtaatctcaccaactgagtcaaaattaaatgagtaaattagatagactaaacctgagataaaattgttgagtgtacaattttccagaatagaagagtaggataaattaagatgatggatatggtaattacactgatttgatcattatactgtaatacatgcattgaaacatcacattgtaccccatcagtatatatagttactgtgtgtcaattataaataaaaaagaaaagtcagaaagaaacattatgtcctagaatagccagtaagcatataactatcacattaaaaggtaaggttttcaaacctgaatcatttcagatggaatgtttttttttctctttgttgttcaaattgatttaatggcttagagcttattgttctccaacccaccaagccttcctgcaactcattgccccacctcctgggtctcctcagtttgacattcagggctttctcyggatccaagacccccatggagatccaacttagtttagcttagagcagccaggcggtgctgctgttctctcctgactgcccagggcattaaatgcctcctccttcaaagtcatcctcaatccttccccacmcacagctggctgtaacatttgtgaaatgttcttccattcaatcaggggttacccgttggtgaggggcagcctatatacagagtggtttggttgtccagaatagtgtatttaaaaagacttggttcatagtgtctatcttcttatacctgcttggttcatctatttatagtgggttctctgtagacttttggctttgtgaccactttctaaattaatattttcctgtattatgtcacatttgaaaagtaggaaattcttaattatatccttgtctcttgtgaagacttttgactagctgctaattattagtctaagaatatctgattatagaagcaaggcctaattttgaggtcctttggtaataaatgtcctatctattcactgtaaaatcacttttttccttccaggtcttggtggtaatatcagaatgtttctrtgtgccacttccaaggcatttatctgagcgttctggtaagtacgataagctcctgtgatctagagtgtttttggaattctgtgatgtgcctttttgtgctcatatagatagtgggttttctctgtgatttactaggtgaccaaataatcactaccaaatttcttaaaatgtgttttctaggtagatttgaacaaaattatttttctccctttcttaaattaggaaatatttcattttggcaattgctttttctttttaagtatgtgctcttcattaatcagtgtcatattttcctttattctaactagaactagaagggaagaagggaaactcaatatatattgcttctgctgtgtgctagtaactyttctaagtcctttaaaagcagtcttcccaaatccttgcactgctccacacttcttctggggccaggtgcctctggatttgcatgtctttattccagactatttttgagactgcataaagatgttcatgagactttctaattgttgaattttatgtgggagtttaaataagctcatgtttctttttagttcttgaagtttttgaggctttgagacttcyattgataatttgaaaatatgattcttagatttcttaaaagtaatagaaacccaatatcaaggattttaggaaaacaaatgaaaatttattagctcacataactgaaaagcccagggacattctagcttcaagcacggcccaagtgatgttaggtttctctgtctgtgtggcttattcataagagctgttgatagtccttgcgcattttctctgtttaaaaatccctgaagaaaaagaggctgtttctcctgactctggcccagaacctctgtggagtactttgagtggcttagcatgtcacatttctgaaccaatcaccatgaccaatagggtcactgagctttctacaagacacaaaataccgagcgtaaaggaccctttgcccttgctgcccacatgccctgctgaagtcattatggtccatgaaatctccagagacaggtggagaagccctaaatggggctaggatgccaaccagagaatctgtcctatatgaccatagtttcaagatagaaaaaactgtcacttaccctctatttttatttcacagctaaacacactcaattgattacngaattaccattgtttattcagaggatattcctctttcttccctccatagagcagaatcggagatcagaggaggctcatagagctgaacagttgcaggatgcggaggaggaaaaagatgattcaaatgaagaagaaaacaaagacagccttgtagatgatgaagaagagaaagaagatcttggcgatgaggatgaagcagaggaagaagaggaggaggacaacttggctgctggtgtggatgaggagagaagtgaggccaatgatcaggggcccccargagaggacggtgtgacccgggaggaagtagagcctgaggaggctgaagaaggcatctctgagcaaccctgcccagctgacacagaggtggtggaagactccttgaggcagcgtaaaagtcagcatgctgacaagggactgtagatttaatgatgcgttttcaagaatacacaccaaaacaatatgtcagcttccctttggcctkcagtttgtaccaaatccttaatttttcctgaatgagcaagcttctcttaaaagatgctctctagtcatttggtctcatggcagtaagcctcatgtatactaaggagagtcttccaggtgtgacaatcagkatatagaaaaacaaacgtagtgttgggatctgtttggagactgggatgggaacaagttcatttacttaggggtcagagagtctcgaccagaggaggccattcccagtcctaatcagcaccttccagagacaaggctgcaggccctgtgaaatgaaagccaagcaggagccttggctcctgagcatccccaaagtgtaacgtagaagccttgcatccttttcttgtgtaaagtatttatttttgtcaaattgcaggaaacatcaggcaccacagtgcatgaaaaatctttcacagctagaaattgaaagggccttgggtatagagagcagctcagaagtcatcccagccctctgaatctcctgtgctatgttttatttcttacctttaatttttccagcatttccaccatgggcattcaggctctccacactcttcactattatctcttggtcagaggactccaataacagccaggtttacatgaactgtgtttgttcattctgacctaaggggtttagataatcagtaaccataacccctgaagctgtgactgccaaacatctcaaatgaaatgttgtrgccatcagagactcaaaaggaagtaaggattttacaagacagattaaaaaaaaatkgttttgtccaaaatatagttgttgttgatttttttttaagttttctaagcaatatttttcaagccagaagtcctctaagtcttgccagtacaaggtagtcttgtgaagaaaagttgaatactgttttgttttcatctcaaggggttccctgggtcttgaactactttaataataactaaaaaaccacttctgattttccttcagtgatgtgcttttggtgaaagaattaatgaactccagtacctgaaagtgaaagatttgattttgtttccatcttctgtaatcttccaaagaattatatctttgtaaatctctcaatactcaatctactgtaagtacccagggaggctaatttcyttaaaaaaaaaaaatctatccatctacttctctcttacctgatttatgtgttagaataaattcatgaaattcgattccaagcatacgaaagatgcctaaagttgattctatgctccttagatccagacagaataatgagtacaggtttatgaaattctaaaagtttctgtcgtctttaaaaaggaacgtgcagtatatttctatctggctgtttagataaccctttccttgtattaattgtgagcacggagctcactggtgggggaggttctgaaactctctgccctcctgtggttgaatgaagatgttgcaagacttgcacaaaggaggttattcttctgacagcatcaacttttagagatggttctttttcatctttccaattcagttacttgacagtctccttccccagtatgctgaagtttgttaagagtcaccagtaattgtgcttttcagacagtagtgcagcttcaaaatcgaggccatcactgggctgatgggctgggagaaccttgccatgtgcctgcctgtttcctgcccccttagtcactgcccatttcctgcccccttggtcgctgacacaccttcacccaaagtgccatggttctgatggtggcagttccatctccctgacatcaggaagcttttctcgatcagagcagagcggggcctgcctgccctcgtgtcactggatttctttctcttataatcagctgaaacagagttctcaaagaacagtaaactcaggttcagaggtattatggaataagaatggtttcatagtttggcttttctatataattcctccctctcaaactgaaatattcatttttttagtggagtatttgactagagagaaggtaaggcagaaatacagtctacactggcttttaaaaatgtaaagccaatttccaaccggaccccaaatagtacaggttgaacattccgttccaacaatccaaaaccccaaatgctccaaaatcttaaactttgagttccagcattccgtcagaagtggaaaattttacacctgacctcatttgacaggtggcagttacagtgcaatcaaaactttgttccatgcccaagattattaaaaatattggataaaattaccttcaagctatgttgtataaggtgtatataaaacaaatgaattttgtgtttagacttgggtctactcccaagatacctcattatatatatacaaaaatccccaaatccaaaaacatttgaaacacttctggtcccacacattttggataagggatatttgacctatatctaattatataataagaaaaatgtattttcttttttttttttttttgagatggagtttcactcttgttgtcgcccaggctgcaatggcacaatcttggcttactacaacctccgcctccctagttcaagggattctcctgcctcagcctcccaggtagctgggattacaggcatgtgccaccatgcctggctaattttgtatttttagtagagacggggtttcgccatgttggtcagactggtcttgaactcctgacctcaggtgatccgcccgcctcagcctcccaacgtgctgggattacaggtgtgagccaccgtacctggcagaaaatgtactttctttctcagaaatacttttaaaaaaaattgaagggtgaggagaaaaacatcttggagaagaggacccattaaaactttaaatatctgtgggaaccatttttcctgattttcccttttttaacatcatggcaaagatgggtttttttccaacaaaatttaatttaatatctttccacttgaagattttaggtttgttttcaatacttaatgaatataaaactaaaggagaaaagccaacctgaaataatttaaactttatatgaacatttcgataagagtttgtggattttttctgtagataatatatttgatccggaactcaagtgcatggaaacatgattttgatttttaaaatctaaaaaaaaaaaaaattaaaatcatgcttccctctattgcagtatcagttatttagtcacagaatggtattttatgtaaattaaaattaggtgaatgcaatgcaggtaactggttttggaatgggaatgtgcagtgctttatgtttggggagttggagcagggtatcttttcatcaattagaaggaaagtttgaaacttctgattacctttatgttggtttctcttattatttgtctcttgctagatctgctaaaccaacccagcttgctcagagatctcatattgaagcaacatacaggcaatccacatctttctttccctttgaagtatagtcattggatgggatgagggacagggcctgttgggttcacagggccttgcactgcatgggcacatacttaaaagctcttgtgcatggaatccctgtctgttagccacaggcctctttagctctatacattcaaaataactactgtagtagaaaatagataagcttcagctgagttggcttttgatagtggaaaaaaaacaaaatttgactttttatggccaaaattccttgttgacagctgtgatgttctaatatgatttgggaatatgtcagtctacagaacctgcatcctgtaaaaacacctttggggtagacgataaaagtcatttttaaggcaaatacttaccatgtgactttttattaccaaatgcatcagtagtggagctggtatgttgtttcataggatggaaacattagaagtccagagaaaaataaattttaaaaaaaggtggaaaagttacggcaaacctgagatttcagcataaaatctttagtatgaagtgagagaaagaagagggaggctggttctgttgctcgtatcaataggttatctgtgtccctcatcttggtgttacagtgttatttctgtcagtattatgaatatgtggttgacccatcctgtcaaatgtaccaacattttcgaaagaattcattcaaatctcttatgccaacagaaaagttccttcttgtttaatatctctttacctcagtcctacattttgattctctggaggagattttagcttgtcttaaaaagccaaatttggagtcatcaagcctgctgaacctgatggggcagctttttgaacagctttctggaagtaagaacttcagttgaaaagccctttgatcgcttcagcccgggacatgcccttcagatggcttattctcagtaaagctttatgtagactgtgacactgtatatgtgtgactcgtacaactttgacgtgtttctgaagtggtttaatcgtatttgttattagcttctttgtggaaatgcaatttttatactaaaaacattgcttatttgcaatgcaatatgttataaatttgttgtttatattactggtattagtcttagcctaatgaacctaattatttttctttctgtattctttgcttcctcaaatagcatctgcagcaattggaatgagaaatccagatatgtgtttcaagtagtacattgcctgaatcacaaatcacttgatcacagtattgtatataatccctgatcctatttgtttcattttattgtaaattcccatttgcatcaaaacctaatgatagtgattggtaagtaaaaacaaatggtgtattgcttttcatacaagtgttttcacaaaagccatttgcctaggcagcaaaaaatattaatttgttaaaaaaaattttccttcgtgtccatcctccatctagtctgttcattcattctctctctttctcccttcctgactcggtgaaactcagaccatgtgccctttagttgctctggaaagtgcacaaaaccaaggcagggtccaaagatccaaggctcttccagccagtgtgttgccatcagaaacctctggggtctccctctgtcctgaggtcttggggtagccagatggcaagggatgctactaatcccccaagacactgtggattggtcttgtctttggggctttcagaaaactcccttctacacctaactctccccaccactatagtggaaaagcatcaaggtggtaaggtgggtccttgaaacaccctcagagactgaaacaatggagattggatttttgtcttttggaagatggtgggggatgtgtgtagtgagaagacagttactaaacctgcataccaccaaggccctccctcagagatactggctcagaatgcttatttgcctatacagagaaaaatgtctgtcgtgctgtctgcctagatgactttggttattcatccttgcctatagcaaaatgcagctttcaagccaacaacactgaattacaaatttaaccccctgctttgctctagtcttgaatgctctttggaacatatttcacagtaatagaaattctttcttggaacatgtgagcttcttgagattgataactgtattacgacagtccagcctgtgctaacagacccgcaaatctcgggggctttaagaacaagaattgtattactgattcacatagcccaggccaggcatcccaggcaggctctgtcccatgcaggtttttctgggcctcaaggtcaagggaggctttgctgtttaacatgtggctgctgggccgggcatggtggctcacgcctgtaatcccagcactttgggaggccgagggaggtggatcacctgagatcaagagtttgagaccagccttagtaacatggcgaaaccctgtctctactaaaaatacaaaaataagccaggcgtaatggcaggtgcgtataatcccagctactcaggaggctgaggcaggagaattaattgaactcgggaggcagagattacagtgagccgagatcatgcctttgcactccagccttggcaacagtgcgagactccatctcaaaacaaacaaccaaaaaaacgtggctgctaaggtggctgtgatcatttccatcccagtcagtcagaggagtaagagatggaggaacattgctgagagattttaaagcgaggctgccacacgtgcatcatttatgttcacatttcctgtgagaggacttagtcacagggtcatacctaacttaaaggaagactaggatgtgtaatcttgctgtgtgcttaagaacaaagggaacttgagagctagcaatctcttgccacagtgactttttcttgcccacctttgtgagcctaggaccttctatagagtaagctcctgggacatagtatgaatgcacatatggcaggagagggcagagtacatatggccccagtgctggaggtcttcctgctggacttgaccactgtggctcttcaaggtaccagagttttcaaactgagaattgtcatttcatggagtttgtattttacttgggaaggtgaatattagcaggaaaagagttacaagtgaaaaagttaacaaatgctatatgagtttataaaaaggaacctgacctaggttgagggtgtagatggtatgtgtgaccaggagggctaattaggggctgtggaggctgaggtggtgtgggaccccttaggcacacacaaccaaactgtaagcagcatgtatggaaacagaagatagcatgtatctcaaagagaatgtcatggtagattcttgccctcattttcttttttttgagggagggatggaggcacagtttcttactaatctttgcatgagctttttctcatttcaatatctttgatatcccaatcagtaggctgggcacagtggctcagccctgtgatcccagcactttggaaggctgaggtgggtggattgtttgagttcaggagttcaagaccagcctgggcagcatgacgaaactccgtctctacaagggatacaaaaattagccgggcttggtggtgcctgacctttaaaaggctaatcatgtgaatctccaaggataagtttagtttctagcatttccaaacttacttgaaaagtgatattgtgaaatacattatttgaaaaccatcccactacaaaaactagaaatgctggctaaaatataaccagtatctttttaaagatagaactgagctcaaaagagagtaagaaaaattcacaaagccaaaaaccaagaggtcaataaatatgaccggatattggaa

SEQ ID NO: 95888 - DNA, 104596 bp, Homo sapiens
ctaaaattcacatggaaccaagaaagagcccgaatagccaaagcaatcctaagcaaaaagaacaaagctggaggcatcacaccacccaacttcaaactatactataaagctacagtaaccaaaataatatagtactagtacaaaaacagacacatagactaatggaacagaaaagaaaactcagaaatatgccacatacctacaaccatttgactcttgccaaggctgacaaaaacaagcaatggggaaaggactctctattcaataaattgtcctgggatagctggccagccatatgccaaagactgaagctggacccctttcaccatatacaaaaattaactaaacatggatcacagatttaaatgtaagacttcaaactataaaattactagaagacaacctaggaaacactcttcttgacattggccctggcaagaaatttttggctaagttcccaaaagcaatttcaataaaaacaaaaatggaaaagtgggacataattaaactaaaaaggttctgcacagcaaaagaaactattaacagggtaaatagacaacctacagaatgggagaagatatttgcaaattatgcgtccaataaaggcttaatatctagaatctatagggaacataaagaaatcaacaagcaagaaacaaataacctcattaaaaaatgggcaaagtatatgagcagatactcctcaaaagaagacagacaagcagccaagaaacataaaaaaattctcagcatctctaatcatcagaaaaatgcaaatcaaaatcacaatgagataccattttacaccagtcagaatggctattagtaaaaggtcaaaaaaaacaacagatgttggacagtctgtgaagaaaagagaatgtttatacattgttggtgggaatgtaaattagtacagccactgtggaaagcagtctggagatttctcagagaacttaaaatagagctaccattcgactcagcaataccattactggcatatacccaagggaaaataaatcattctaccaaaaggacacatacacccatatgttcactgatgcagtattcacaatagcaaatacatggaatcaatccaggtgctcttcagtggtagattggataaagaaaatgtggtacatatataccatggaatgctgtacagccataaaaaagaatggaataatgtcctttgcagcaacatggagatggttggaggccataatcctaagtgagttaatgcaagagtagaaaaccaaatactgcatgttcttacttagaagtggaagctaaacattgagcacacatggacataaatatgagaacaacagacactgcaggctactacagtggggagggagggaagggagcatggattgaaaaactacctattgagtactgtgatcactacctaggtgacaggatttgtaccccaaacctcagcgtcattccatatccccaggtaacaaagctgcatatgtgccttggtatctaatataaaagttgaaattataaaaaagaataagcctcttaagaaaaaagtccccctttacattccatctcgcctaaaccatggtcctcaaacaatgttgtgcatcaaatcacctggaaggcttgttacagcacaaatagctgtagagtttctgattcagtaggactaggatgacgcctggaacttgcatttctaatgacttcctaggtgatgctgatgctgctggttcaaagtcacactttaagaaccaatggcccttatgtgtcttctttagtttcaccgggacttgacctgattaacaatattagattgcctcttcattctaatcacattagttgcaggatgctaattattttaataaatgctaaatttgcacataaatatgcagataaaaggtcatgctttaatctttacattttgaatgagttataagccataattaagatccctttgaccacattttcataataattttgttaactatgaaactgaattatttagaacttgcttatcttattggcagatttttcacatcctaatagcgattttaatatgtcatttcatctgtcactacattgatgcaaaaagtaagcatttgtgaactttgagaataaacctatgtactataaaattctatgtcaattttaacagcatatgacccttcgattaaattaaaaccctttattttttatatactatatcattacagctgggaaagacctaatggcttatatttttggttctggtttcattcccagtttgcctaataggctgctatggagcctgcatctttggtttctagttgctttgtcagtagtaaaaatagatttgatccatatcctctctcctgctccttttggtgacccacagcatgggaatttcatataacaggtgactgtgctttgtgttcactctgtggccacaggtcaaaactaagtcacagattacatactgaaccccttagtattcttcttcatcttagacgattttccttctccaaaataaactcaaagggtatttacccactgtaagatatgattttacaccctattctttctaccatataaagcctcatgaagcatgggataaggcaattttcaaaaagatctgataatataaatatacattagttatgaaagacacttctcttgggggtgtagaaaataaactggactaattgcaaatctagcaaagaaatactcaaagggattaacttacttgaagaaaaatggcaatggccttccagaagctcaagaatccctttgtccaatctctcgtacattagggaattgtccttatataattgacattaaacaaaagtcttttggaaaaatgtgttggtaaagtatattgagaagatgagggtgggtaatattaatgaaatacagtttatcattgaacaatatgggggttagaggtaccgacccaccgtgtaaaactttcgactcccccaaaacttaacaactagtagcctactgttgactggaagccttaccaataacaaaatcaacttacacatattttatatgttacatgtgttatatactgtattcttacaataaagcaagctagaaaaaagaaaatgttattaagaaaatcataaggaagggaaaatatatttactattcataaagtgtaagtggtacatcaaaactcttcatccttgtcatcttcacattgtgtagaatgaggagcaggaggaagaggagaagttggttttgctgtctcaggggtggaagaatctaaagaaaatctacatataagtggacccttttttttgttcaaaggtcaactgtgcctactatatgccaggtgtttaagcgatgatatatcctttgtcctcacagtcactcctcagggtagggatgaatatttctctttgtcttggtttgagtttcaccaaaaggagactgagaggcaagcattcaaatgcaaggagtttatttgggaggtgaagggagcaccaatgaggagtagggaagtctgattagaagggaaggcagccaggccgggcacggtggctcatgcctgtaatcccagcactttgggaggctgagttgggcggatcacgaggtcaagagatcaagaccatcctggccaacatggtgaaaccccatctctactaaaaacacaaaaatcagctgggtgtggtggcatgagcctgtaatcccagctactcgggaggctgaggcaggagaattgcttgaacctgggaggcggaggttgcagtgagccgagattgcgccacttcactccagtctggtgacggcgtgagactccatctcaaaacaaaaaacaaacaaaaaaggaacatagccaacacagcatagattatcaaccagctcacactgtggataactgaaacctgcaatgtagaacataatcctaggagtaatcccaccagaagaatgaactttcttgggcttgtgattgagggctgttccacagggtatggaactatactatttggcatgctatgtttatgaaaaaagcaggctccaagttcaagagcaagttctcctacaggtgtaggtggttggaatgtagatagtgaacaactggcaagcagctttaagtggcggctcctagattgaaactcaggtctaactgtagttaaaatcattgctttctcaagcatatcctactaatgtgaatcttccccaggtgttccatgattgagtgaaattatagactgagaccacaggtcttttggaatagcacttccctataccctctccagggcaagataagactctaagaattagtggtaggccatgtgcagtggctcacacctgcaatcccagcactctgggaggccgaggtggttggatcacttgaggtcaggagtttgagaccagcctggccaatatagtgaaaccccatctttactaaataaaaatacaaaaattagccaggcgtggtggacatgcctgtagtcccagttacttgggaggctgaggcagaataatctcttgaacctgggaggtagaggctgcaatgagccgagatcacaccactgcactccagcctgggagacagagaaagactccatctcaaaaagaaaaaaaaaaagaattaatggtaaacctaaatgcccattaagagacaaatggataagggaaatgtatagatatacatgcaatgaaatattattcagccttataagagaagggaatcctgtcatttgcagtagaacccagagaacattatgctaagtgaaataagccaggcacaaaagggaaattattgcattatttcacttataggtgggattttgttttaaaaaagacttcaaatgcacagagctagagaatgaaacagtgaataccactagtgggaagcagggaagaggaaaaggggtgatataggtcaaaggatacaaaatagtagacacgtaggatacataaatctacaacagggtccctaaccttttcggcaccagggacaagttttgtggaatacaatttttccatgggcagtgggggtaggtggatggttttggaatgaaactgttccacctcagatcatcaggcattagattctcataaggagtggcgcaacctagatccctcgcatgtgcagttcacaataggaggcggagctcagtctgtaaagcttgctcaccggctgctcacctcctgctgtgcagcttggttcctaacaggccacggaccagtaccagtccatgctggggagtttgggacccctggtctagagagcaaacgtgcaaaatgaggactaaagttaataaaattgtatcatattaggaatttttgttaaataagttgattttagctgttcttgtcatacacacaaaaaagtaattacgggtgagatgatacatatattatattggcctccctactgtaaccatttttctgtgtatatgtatctcataatatcatgttgtaaacctcaaatatacagaatgaataaaacaattagctgtcaatttggccttaatgttccatgttaaagccaaatgtctatgtttgtaatcagctaaattttatattgtgcagaagccctgaatttcacggatgccccatatttcatggatgccccgttcagttcataagctcttgtttacatgatttgtgcatgatccaaatgtggaaagaaaatgagtgggcagcctattctgggtatcaagcaaagagcacaggcacagaccatgtgcaataagcagccttaggcaaaactgaaccaagagtggtttcatacaggtattcctctaagtctttaattttttacttattcctttcccctttttaatgtgatagacacctaatcaccttctgctgccttcccaacctcaactttggtgttctttggcagatagtgacttcggtgttctttggcagatagcctacaaatgaaatttcaaaggctaagcatataatgtttgctcacttgatgtaagcaacagagaactaaatctgaactttggcaaaagtctattaataattgacaaataacagaacagtgaggatgtagaaagcaatacattaaaaaaaaaaaaacaacgaactccatctgggatagcaataacctgtgaaaatgctcccccggctaatttgtatcaatgattatgaacaacatgctaaatcagtacttccaaagtctatatatgactattacagrtctggggcaaatgatgaagaaactttggctgataatattgcagcattttccaggtaagaaaatttattttttaaaatcatgttttaaaattacacaaagaccgtaccaaaataagatctcctagttttacgttggtggtgtgtaattatttgttcagatttgtgcttagtagagagggaaaagttcttggggctgtaagaaatcttgggcctttaaattgttaaaaaatattccaagcctgtgaatcttgaggaactgactgcaaaagccaaacctatgttacttcacttggaaatatgacaacaattaatttaactacatgtaaaaatagcgataaattcggatgacttttctttttcttagtatgacagtaaatgcttaygttcatggtgtaggaaacagcattaaatgccagataaccatcttatccggatgaaccagactggattgttggctcaaatgttttcttcctgctggcttttcgtgttatcattcattttgattactgttgtctaaactttcactttagatttcaatttgtctatgcagcattwatctttcaactttgctgtttcatctctccttcaaagcacttcatctctcttcccaaattagttttcctttgactttcatatttcaaagcacaagatggtgggtgacatggtttatgttttctgtttgtaataaaaacaagaaataaaatcatttcaaagggtttttttttatagcagttacaaaaatggtttatttgctggagcaagagaggagtgccttcactacactacactcagtctcatccatctaacattatggctgttagtaaaggcaatcggtattgtgggtactcattgatggtgataaagacaaaaaggcagaaaatatgcagggggagagaattagccttcctccctgatttcttctwwagtctacaacaaaatcactcaaaatcagttttccatatttaaattaggagaaataaaattatcctggccaaggtggtctctggtaggcagcactgattcacccacaaatccatgtagaagactgaaaatggcaatggggtgaaggatacggcctctccccaaccctttcaagccttgactttgtctcaggttttgcctggaacccaratgagctcaacaaatgccagggaagtcatgggaagggaagttgactgagagtagaggggcttaaaattctgcatcattatttactattttggactcatttaaaagtttctgctcttggaagatgccccttcttgggckgatattaactttgtccaccaaaatttgcctatgagtggtctcttgaaaacactttaacccaaataggttattacaaccaaggaaatttcagacccttgacagatttatagagttagtgtctcagcattgctagacctccaatgctcaagtgattatttatttcatttgtatacagctttccttacttcttaattccctttgtcgcatgctagctaattaactagagctaattaggagtctccatgagctacactgtgtactacatgctgaggacaaagcagtgagccagacaaagttcctgtccctaggaacttacattccmctggatgcatatcagcctccataatgctgttgggttgaattgatgcaaaatgggcccaaaatagttggccaagtggaggtctcagagaggatgcaaaggggcgccccaaagcagatggatcacctatgcaaccctttaaaatgtagaaactttgggagacatagaaggcttggtgacttctaagttatgaactggaaaagtgcctcatgccttatgtgaattacatggtattcaagtgagtattcccatcctatgtgtgtaccgagtaacttagggataggacacagataatgaaaatgaatttgcagtgycaccttttccatgaaccttgatcattctcttttgttcagctttaaattaaaaaaaaaaatcaatcaactttctttggaggacagctgatgctattttattatcaactagttgagtttttattgcaatacattttgcaatgtgtcctcttttgctgtaygactcgctaggtgamccttgattcctcacactgcatcatgtagctggtcacgtgaaactaagaatagaaattctgccagggttgtggagactttgggttgatggcatgaaggaaatcaacctgaaatttcacattctgattctaatgaaaagtgcaaaacaatcaaacctcagataacccattgtgatacaaagccagagtatttcaaacacatttatgaaatttatacacctccccatctckcaagtacaacaaaaggtcattcaccgtgacagcttttatttctctgtactcagctctgataatcacattttggagttctggggacatggaccactcatgtgacccagcagttgcttggagatatttttgggtaagacttsagactaatattactgtggcagtagaaaaaaatgtttaaaaggacaagtaaatggaaccacccagaacaaaatttcttacggtggttataacaaaacagggtaaatgtcaacttgctacattttgcatggctggaattgattgggattaattcaacgaagaacagtaatttgtttctcttacacatttattcaaagtagccttctcaactatggtcttcacgttgttgtagcttttttttctgaaattatcaatgatggaagatgattaaacaatttcgacacttagaagccctcatgatttcagaaaaggaaactcttttctgctgcgttacctattgagactgaagatggcatcattttcttttaaataacagatgggtaaaagtgatgtcattctttcactttaatatttgagaagtgatatgaagttaccagtgacattgtgttctcataggcataaatgtcacaaaataatttatctagtatccayaataggtgaataaggtgtttttgctttatatattttaactgtttagagtaaaaaattaatgtggagaaaattggaatgcagtattataggattacacaacttacaaaacatgaatccactatgtccagttagtgtgattcagaaacagcatgcagttataaagctgggtgaggcatgggtgtcttccttcaacagggcagctactttstgaggagtgtatatatcatttgatttttttataagttaaatttgaggcccytgttagatgtgagggtgggccaaaattcctgtgaacagattctccccgttaccccgcttcctttactctggcatctcattttctatcctttgaaaacggtttattattcaattggttcaactgtttgccagttgaaccaattctttttccaaagtggaggcccaggaaagcacagtccgagaatatagtgaggtgctattttatgtatgattgtgggaaatttacttaaatttggagtggggttgggcaaggcttggaaagctagtgagctatctgacatagttgttactactatttgaaaaatatcaaaacatggaggactctttagataacatgcctgttcccattccattgattttatctaattttacgtagcaattacgttttgtgcattggttgacaagcctctgtattatcctcagaacagaaaatactgtttaagggaaattaagagcccgcagttactaaagtgactgcgccaccaagtggacaagtgtaaagccactgtctggagatggaaggattcagctttgctttataaatgggaatttgacctttaaaaatgtcccttttggcacgcacgcgcgcgcgcgcgcgcgaacacacacacacacacacacacacacacacacacacacacacacggctgctgccctgcagatttgcttgttcttgtcataaagctttcattgtttctctagctctaagtaaatattaatgccttccaaggctggcatgccaatggctgctattaagatcgttttctctcattctaataacacacttagagatgattggtaataaaaactctcttcaaggcttctgcttctcccccttcaaaatggagatcaaagaatcatgctgtgagggtccgtcaagaagaaaagactttcagcaacagagcatgtggtgtggcataaaataatgacaattataatgttcaaaggaatagcatagaaatcacacagtaaaacttctttattatgcttttcagggactggatgtttttactttattatgtgaggaagggttagattacagacccttagctattccacaaagcaatagaaggcagaawttcttcttccgctacaggaagcacgcttcgattaagggctttttctttttcttctttttttttctttaagttactgcattactatatcatacttcactatatttactaaaaagtcatgctgtttctggaagtagagttacatctaggaaatactaggtgaatgctggttagatatgcatgtgtgcctaaacaacacgtttattatactcatgcatactagaaatagggctgtattttcttcaattttaatcagtactaatgagaataataaatcaaaacaaataggagagatatattttgccaggaggaaagagaactagttcttctgtaaattttactggtgaatttttggttgctggtttattggtaattttcattccaacacagaagaatcacagaaacattcatttaaaataattttccggagtcaaaaactttttaacacccaaatttcagtttttgtcaaataacatttttgagaaaagtgttaaattaaactaataaaaaaccttccctcatcattagactttaatgaatatggcatataactaaataattttgaagaaaccaaattataattttaaaagtaattgcctgaagctgctgtttatcacataaaaagaagacaaactagacatagcatatcttcttaaactctaatctaaactctatgcatttgtataccatcttgattttcaagattggggaagtgaaacgaaaactatgttcacacaagaacctgtacgtgaatgtttgtagtggctttatttagaatttccccccaaactgtaagtattcaaaatgtcttttagcttgggaatgactggacaaatgatagtacccctgtatgatggaatattattcatcaaccaaaaggaacaaactattgacacgtacaacaacatgagaaaatctctaatgcgttatgttaagtgaaagaagccaaactcaaaaggctacatactgaatgattttgtttacatgatattcttgcaaagcaaaattatcaggacaaagaaaaaatgcatcagtggttgtcaggggattgaactggggagagtttctctgcaaaagaaaatggggacttttttgggaatgattgaactttttctagwtcttgattgtcatggcagttacaccactgtatgcatttgtcaaaattcacaaaactgcagactaaaatgagtgaatactattatrtattagttatactttaataaataattgcttgggaaattcattatcctctaattgttaactttctaaccaaacaaacagtaaaattgcctcttttccattagctttatgaagtcatttgcttgtttggaaaaaatccaattatattttttcttttaactaaaatgtaatgtcaaagttttggttatgattytgaaactctaaagccttttattttattttattttttaattctagatggaagctgtatccaaggatgctccggaatgttgctgaaacagatctgtcgacttctgttttaggacagagggtcagcatgccaatatgtgtgggggctacggccatgcagcgcatggctcatgtggacggcgagcttgccactgtgagaggtaggaggaagattgtcaccacagggacagaaggaggctaacgtttatcgacctccttctctgaatgcaccaagcaaatatgttccttgatgtttttacactcagaaacattaagctcatggactctatcatcaaaatacttgttcttgcatgtcctgctcctcttctttccagctgtgtgactgggcaagatatcctctctctgcattggtttccttggctgtaaaatagggacaaaaattgtacctgcctcattgggttatggtgagaattgaatgagttcaggtatacaaagttcatggcagagagtaggggctcagtaactgttggttatattatgggtattaatagtactgtctcaggaaatggatctctgacaggtagacttgcccaaagtcacagctaggtagttacagaatyggaattcagccctgtggctaccttatctcaaaaccctcctgcttcccccaaaccaaagtggttctcacagccaaattgcaaatggagcaacgtggttggttgtgttttcttccgtggttttgggtcatgattcttttttatggatgagttatattcccaatagagcagttccagctgtcttaggagggagtgatgagaaaatcaaatatgatgtaaagaaatctcttattagggctaatttattaactttccagttctctagcaactgtgaacatttgaaaggctgtgcagagtaaaaaatctccccaaattgtgctccagaaactaatataaaagttggaaatgaattmttttgatgctaagcagagcagaaaaagaacacgactatataatattttaaaacattttagttttaagaattaaggatcttgtgaattcacttcccttcttgaaatgtctgacataaaattctgtcagggatatcagaatggcacaatgaggttttgctggacagacttagcagcttccttaattctaggaccacatacaaataagtggctttggggcctcagccttttgtctatggtaatcctgaaacataagtagagagaagaaaaaaaaagggaaatactaaatgggtaaatatctatacaaaatcaagataataaaggccctttcaggcttgaaactataggcaacaaccttagaacaaaagaaaacaaatgaacatcaaaaaactaaaactttagtgctcttaaatctcaatgaaaataaaaagtaaatggtaaactgaaagaaatggaaaaaaaatatgagactgtgaagggttaatgtcctttccacgtaaaaagcccttatatttgaagaagaaaataatatattgctcaaagggaaaaagagaaataagtgaacaaaagatataaataggaaatttacaaatggagacataaaagtgaccaataaacatatgaaaaatattcaatttcattaataagcaaagacatggaaattatgaccatctattttattttccgtatatcgaatttttattttaagatcaggcagtatgattaggttagggagaaaatgtgcatttcaaacagtgttgagaaaagtataaagtggaataatcttcctagaaaataatctggcactgtatatcaaagctctaaaaatgtaaattccatgtgatgttaaaaattctcttctaggaattccaaggaaataattatgatttttgaggaaaaaaatcatttctgcarggattttcatgcttcttatttttagcaggaaaataatttgaaaaaaatacccaamcatcttataattggagatagtttgcaaaaaatatgatgcataaaaatgacatcaaatttaaaaattatactataggaagagtgcaataatgtagaatgatattttaatttaaaattgtgagaaatcagttgcaaacaatagtcaggtcctaaaatacatttagtttcaaagatcacaatttacaaatgtttatttataagtgatgagattactcctgactttatactcttctgatttttggctcaaccttatmaactcttctttgaattattttgtaaggaggaaatgataacaattagatttaaaagagtagagataaagggacaagggaccatgaagagaatggaaataaagaaaggaagcagagaaagcaaaaagcagagctcacttggtaaggcaccctggagccagcaaattatttttaccacatgtattagttccttctcacactsatttaaagatactcttcragactgggtaatttaytaaggaaagaggtttaactgactcacagttctacatggctggggaggcctcaggaaacttacaatcatggtggaaggcaaaggggaaggaacgaccttcttcccatggtggcaggagagagaagtgcaagcagggaaatgccagatacttataaaaccatctgatctcatgagaactcacccactatcatgagaacagcatgggggaaaccacccccatgatccaatcacctcccactaggtctttccctcaacacctgggattataattcaagatgagayttggatggagaaacaaagcctaaccataccaacacatattgctttatttgatatttgacaggtgtttctgtccctgttttgtgggcaagtagctaaagttccagagaaaacagtttttcatagctcgtcaatgacagacttattctccaagtcacatttgatggttccaagaccagtctttattcttggtggagttgggctgagaagaaagaggagaagaaagaagaaaagaaagcttccttagaaactatgatttgacagtgtaagtaggactatttcctccagaagtaaccataagaagatattaaatgcctattacagtcttatccccttagatttatttaacacttataaagcaattatcatgttccagacactattttaagtatattacgagtattatagcattgaaggctcagagcggcccawataaatcgatcatattattaaacctattttacacaggagaaactgaggtacacgccaggtgaataaccttgcctagggatgcacaattcataagtgatagagatgggattcagacagaggtattctgtctccagaatctgggctcctcaccactttgcaagagctttaatttcagaaactcctatgaagtgtcatgaggagaagcccattatgatcccctagaagtaattatagttttaggagcatgcaaagcagacccctcaggaagataagttacacaatagacatttggataaggtggatccagcagaacaaagagagggtggtgacatcgagattgcagaggaattggagaaggcaatggaagtgtacacatgttgccctcaaaaacatagggtcctccattgggttcctatcagggcagcaacatcagagtttctattctgtatttatactagaaacctctctccagggtttctaagttttcacctatgttttaaagactatctataggttattagtctatttaatatttaggtgtatccagaaagctgatggtcatcagctcatagcaggtgttctttggctggtgtgtttatgttgtgggacagtgggttacttgcaaggaaaggatgaatggctggagtagatggtgcttgtgctcygcatgtattcccttcttacttcccatttccatcagacctaccactttttgcctgacattatctgttgcaacatgagcccatggataggtgtgtttgaagtaggggaatgggagagagggttccctagctaatgatgtacagcagtaggtggataaatacctcagctctctttgctcaggtaactgaagcattttctaatatggtcacccagtgttccttggaaggattgagtcccagttgccccctgaggttgcctgcccatgaacacaccctcttttattggcttccttcccattcttttctcacttccccattccttcaattcattgagattgtttccaaataagatgacttgctctcacatctctgtgtcatttttggcttcttgaagtatgcaaaccaggataatagctaactgaaggctatagatagccacaggcaaatttaagtaacagtgtaagaatattcatacttggcagagatttatttataaaaactcagaaaattcacatggaattatgaagttattattgtatttattccatcattcccagaaagaatatggaaatcctctcaagcaagccagtccttgggaatattgggaaatctatgcaatttgttgtggagtatttttttttttgttaccctcctaaatatctggccgctaagcattcctgtctccagggacttagaccctagcaaggaagagaagttggggccaggttcagaaaacgggttagttatcaatctccctggagaagtgtccccctcagcagggtcagtgagagtaagtgaaacccattggtgcccacaggcaatggtctggcctgagtaattagaatgggcctccagaaagttctgggaattgctatggtgccatagtctcattttccccgttgactctccagatttattcagagtccaacttcaagggcctttctgcccttcctctcacaactgtggaataataataatccaccttattaactgggaccgagaactgagctcgactcttatttttttgagacagagtcttgctctgtcaccagactggagtgcagtggcactatctcagctcactgcaacctctgcctcccaggttcaagcgattcccctgcctcagcctcctgggtagctaggactataggcacgcaccgcgacggctggctaattttttgtattttagtatagacagggtttcaccatgttggccaggatggtcttgatctcctgacctcatgatctgcctgccttggcctcccaaagtgctgggattacatgcgtgagccaccgcgccctgtctgaactctacttttttacactgctgcatgtttgtagagtgaccaatgaagctatacttttttcattttcaaaatgatgatgaatacaaggttatcaaataaaacacagagggcccattatgtttgaatttcagataaacaacaaatcataggtgtcctgtatgtttgctcaatctggcaaccctggatgaataagagctctcacctgaggatttcttgtgaggattcatgaaataaatgctagaaatgcttacacactatctttatttgcccctcagagcccaaagtctcygaaatctttatctttcacacacaaaaactcactttcagaaaagtatattccatttacatctagtggaaataaaaattgttctttttctttgtgaaaaatatttttattttaagctttatgcagaaacctcagggaaaaaaaggtacttttaggagccaggcttgtaatgtaaatgtccaaaaaagatgaaattgaaacaaacaaacaaacaaacaaacaaacaaaaaacagtgcaagctcctgtgtggagactgcagtgagtctgagattgcatgttccatcagaagggggcagccacatcttagctcttgatgacccaagggagcagggatgtggggttgccaaatcttccaaaattttaagaagccagaaatcttgatttctatgtacaatctcctggtttttaaatgtgggcaaataaatcaaaattccctaaaacactgtttggggcaacaatgtgtgggccaaagtaaatacttttgtgggctacaagtgtcccctaggctgtacatctgggacatctgatttatgtggaaatttaccgagaactagttttatttctgtggcaggtcattttcactttctaggattatgtttcttcattgataaagtgagctacttgagcaagaccagtggattgaatgccacgtcccaaggaggctggggttgtttccagggatcttacagaacttaggtgtgatactgagcatgagctacttgtgttgcattttggtgttcaaaagaaaagttctttaaatagttctgctggaaagacaaaaaaaaaaaaagaaaaaactttcacaacaaaaatctccaaaaacaaaaacccagaaaactggcatagaagtggatgatctttgcaatttttttcagtatatarataaatgattttgatcccatttaaaattttatcaaatgcaaaaagaaacaattcaaagtatagagctaccttttcttactctactgaaatctacactttatgtcagccctggagggtttagacgcactttatgtcagcccacttctttccactgcactatgtcagccttggagggtttagatgaggcagtgagcatttgaatgcttttaatttccatttttcaaagtacattcttggtctataggagaggaacaagatatgtaactatctctgactattgctaaaaacacaaacgtctttaataaatgttgcataaactcagaaagtgatacttcaaagtcttgtgaaaaatgatgatcaccagcatttatasagcaattagtatgtgccacgcaatttgactttattatttattcatctatctttaccaccatcttaaaatatgtgagtgcaaaaccctgagaaactttctccaactcctgtgggtgtggaaatcgaggcttagagaggttaatgctttgctcagattattaatcacttaggcagtgctacctataatatcctgctctgttactggtatttccaaacgtcattaactgtagcaagaatcctaaggcaagcactatgctatcatcttaaaatatttattgcaaacatcctatgttttattgttttatctttttaactttgagaagataaaataagccacagaagtgaaattaattgggaaatcattcgctttttgcaaaatttgggagcataaacaatgggtcatgaattacaatcaaacaaaagataaaattctaagaagtcttttaaagtggaaaaaaataactgaaaaatactgaawggaggrcagtttttcatgcactgtgttacgaataaaaaatttgattcaatggattacttaatcaacattttaatagttgtaaatcttataatatttaagctgttttataagtgcctctacttataatggcacatccgtttgaaactctagcagatcatttttatttatttttttgaatttttttctttatattctttaaagaaggatacaaaattatttctaygaatatttaacatatggaaggaaatagcaataataaacataaatgctaacacatataaaataggtggtatcattaggctaaattttagtcttccaggataagtagaacatctctgacttctcaaatatccaattaataaaatgcttactataccatttggtgctttaagaacattgccatggaaacctctcaggttttatgcacagtagctataataaaattttccttcatctttcatggagctacttgagattttttttctccctttaaacatgagaaatcaaaaagaaagagaaaagaaggattaaatattcatttatccttttgcttctgacttgttatgtgggcaagtgccacatgagggagtgctgggacctcatatcaagaaaaatkaaaacctacctaatgcgttccaggaatgttcagcatattagcaaattcttattaaactgtcaaaaaaaaaaaaagttttaaaagaaattccagcccctggatgcaattagaggctaccacactggatttgatgggccataaaaccattaaatctaaacactttctttttgagcctaaaaggccagaacattccaaagtkaagttttgggactcagctatgacttgaccacctattaagatgcaggtggaacagattgcagagtaacacaaagagccacacagaccccagatgactgcattagggtgtaggtgagagttttagctgttgaattttctggattttccaagattaagtgatcaaccttaacaatgagtgaaagaccattcaacaggaagaattgtcatttcctttgctctaaacccaaacgatgtattttttgaaagctttattgatttatatatttatgtgttgtgctaggcgaccgactagatatatgtttcagcatacctactaggaaaatatccccattattctcaattttacctaatccaggcaaagcactggacttgctttaaggaacatttttactctttctgaagtggagtgcctgtcatgtatcaggtgcaatgcttggactttaygttcttgtgattaatccttacaataggcctgtgaagtaattctcattctgtttgacagtagagaagaaggaagcccttgaccaaggtctagtgccagtaatggtggtgatggggkttgaacctaagtctgtttcactctaaagtgtaaccaaattttatgttttagacttgcttttctaacaataaaaagtcagtgacatgctctttctgtgtgtaagcactcacacacacacacacaaacacacatccgtattacatatgcttatatatgtattaaaagattatggacatttgatatatatacatatactaaaatgtataattcattgctaaagtattttcatataaatagtggcttcagtgttaaaatcactttgcaatgaaacaagattgttgattaaaacacctattaaaaaattagaatctagccatattaaagacagtcatcgaatggagtgatttctacgattttgcaccaaaatttaagctattgggtggctttcttgagagcatgagattgcttcttctcagaattattaatgtgcctgatgacattaaaatgtgacagtgaaaaaagtcagaggctcacatgtgtatcccaacactgaagttgttaaacactgggaggttggttgaagttgttgtgtgcaaactcaatactccttaaaaccattatttaaaggcctatcactgtgttatggtctccatatgatctgccatttatgccaggacttgacaattcagtaaaatgacagaataataacacaggaatcactgcagtagagctaatgttttagtctgttgcagagttctgccctagaaatacagtgaaaacaaggaagggagagctaagatgtccctgagactaattgttccttgaaaatattttcataagtaaaaaagaggtctagaggtgtagtggcagtgtgatcactcaagattatatagctccggattcgttcaatgggccatgatgaaagcacggcaacgattaartctggtttcttggtctttcttggcagtgtttaaattggttcagttccataaattgtaaattaagatctgtttgacaacttttaagtatttcaagcataattgtagttgaaggtttgttcttttagatcactgacttcagaactttatttttctggttaatctcaattgtaattttagacattcataaaacaatgttgactgcgtctatgtgatggtagatcctctgtgaagacctttatgatggtagttcccctgtgaagataggatgacacactcartggacattatggtgcacagttatacaaacacttcactatgacaggccctgrgtttagaaccacacaactgcttggtacttggtcatcgcatattttccccattacgtaatgacttcctgtgcagatgacaaaatgcgttttctcaacaaaattattttcagtgcagctgttttgatgactaagttttgtaggagctttttaatcaaatgcacctaagaaaaccccaacactttaggccctttgaacatattacacttttttgcttcctctttcctctttttccttaaaaccataatttggaaatttgattctgccttcccataaaagagaattattttcaaagaaattatttgggtctaaattaacatgttacttaattgttctgyttgaatctaggtatatgattagtcccatatgaattgatgttccaaataatttactctcattgataactaatattttctatttccctctattgttttgtggtggtggtggtggctgtggatgaacatcattctcaaatatattatrattcccttcctcatcaagcccagcatgataaacttcagttttgcctgatggttcatcatcttatttctgtgtgtaagattgttggatytgacattaaacatttggaaactattttataattgataacttgtgctttctcagctttgagtaagcgctctcttcttcatcttataccattttatttttatttattattcacttctgcttctgatctgagatctaggaagctggacaaatcccagataagcaagctaaacaaacaaacaacaacaacaacaacaacaacaacaacaacacaacccaaactaaaccaaaccaaaatcatgggataatggttaagkgtactgaggggccattatgcgaacacagtttaattccttggctttaaaactaataagagaagaatacataaacaaatgtggcaaatgtacctgtgaccctctccagagggtgccaggctagaagaaaggcagatttatcagcaaggcatggcgggccattggcaaaccatgggacaaccactaccaacttcactgccattgctccatatttccctccyrttttcaatgagccccaactttgctcaggacatcacacatattctactaatttggatgagtccttttgaaagaaaatatctacctcatggttctcaaagtatggtccttggaacatcagcgtcagcaggactctggagcttgttagaaatgcagatcttaggtcscactacagacctactgagtcagaatctgaattttgttaacatacccatgtgattcctcaaagattgagaagccctgatcagagcctgggatgaaagttcctgttggttccaagccaaaggcatagttcaggtcttcacacatgacactattagatgtagatggatattgttcccttctgaagaccctcaaggtcttctgagagcctattaagttcagaatgactgcctgaaatgagtgagaagtcacaaggagactctagataattaagagatgtgttcacagtagtctttgataaaaacctgggacaggcaggcttagtatgcaggcccctaaaatttatgtacacaatggatttcctatttttgcttcttcacatccagattacctggatcagaaataaatgttttcattaagacttgatgtgacaaacaaacaaaacaaaactctgccaagctctagaagaacaattgcatttcccagccagagggagaacactgccagtttttgctgttttccaaagctgtttacctgtcctagctcatttaaatcactgtactttggagttcmggattagcrtccccagaggtagctgcattcatacttgatgasttcttttaaatctcagccattgattgtaggttccatagtataggaaatttagccaaccctctattgaatggcagtttagaaaggtcgagctacacttaccttatgtcaggttattgcagacccttgtggcatttttccaccctaggacatgtgatttaactctaatagaaatctttattatgggtgggtctgagattaacttttattctataaaacagaaatcatgccactggccgtagcccattttttgagatggagtggggggaatggatgatagtaaacaaggatattaatctcatttatttttatatcattatatttatagttacattgcaaatggaagagtagagaaaccaaaaacttacactgggaactttacaatttttcttccaagtattactgattgatgtttggactatgcaagtgctgccagccccttagactcactctgcagctccccccatggaaatttgtgaacaggttagggtggggatagggaaaagcatgttcttgtttcacttcttggattatttgttccaggctctccaaagtaatgtgtaccttgggaatgcagaaattatctccttagatattctctccctatatatgtcctcacagggarttcttggaattggagaagattccactctcctttaggagctttctccataaaggtattgagcattggacactatatttgcaagggaaaagaggaatgggtctcttgagcatcaaaatcattgtagaagaatctccaaactgtttttcaaaatgtctgtactaacttacattcctgacatcaatgggttcccttttctccacaagggttcccttttctttgcatcttcaccaacacttgttatcattggtgtttttgataataaccattctaacagttggaggtgatwcttcattatgattttaatttaaatttccctgataattagtgatactgagcttctttcatatatctattggccatttatatctcttcttttgagaaatgtctgttcagatcctttgccaattttttttcttttttcaacttttattttagaatcagggagccatgtgcaggtttgttacaaaggtatattgcatgatgctgaggtttggagtgcaaatgaatccatcacctaggtagtgaccacaattccaaacaggtagtttttttcagcccttttccccctcccaaccccactgttgtattccccagcatctattgttaccatttttttgaccatgtgtatccaatattcagcttccatttataagtgacaacatgtggtatttggtttttggttactacattaattcacttaggttattgatttccagctgcatccatgttggtgcaaaggacattattttgttattttttatggctacatagtattccatggtggatatgtaccacattttaaaaattcaatccaccattggtgggcacctggattgattccatgtctttgctattgtgaatagtgctgtgatgaacatgcaggtgcacgtgtctctttggtagaatgacttattgtcctttgggaatatacccagttagtgggattgctggatcgaatggtagaaaaactctcaggtctttgagaaatctccaaactgctctctatagtggcttatttaatttacattccctacagcagtgtatcagccttctcttttctccacagactcaccaacatagtattttttgactttttaacaaaagtaattctgactggtatgagatggtatatcattgtggttttgatttgcatttctttgatgattagagatgatgagcatcattttcatatatttatcagcctcttttatgcctttgtttgagaagtatctgcaaatgtcctttgcccactttttaatggggttatctgttttgtcatgttgatttgtttaagtttcttawagattctggatattagacctttgttggatgcatagtatgcaaatattttctccaattttgtaggttgcctgtttactcctttgattgtttctcttgctgtcctttgcctattttttaattgggttatttgttttctggctattgagttgtttgagttccttattttttttttttggatattagcactcattagatatacactttacaaatattttctcccaatacctgtgttgtctcttgattctgttaattgttttctttgctgtgcagaaacattttagtttcayacaattccttaaaaaactaaaaatagaattgccatatgatccagaaattctacttctggatattwattgagaggaattgaaatcagcatgttgaagagatatctgcacttctatgttcgttatagcattattcataatagtcatgatatgccatcaacctaagtatccattgacagatgaatggataaagaatgaggtktatgtacacaaaggaatactattcagcctttaaaaagtgggaaattctgtaacaacatggatagacagatactatatgatcttacttatatgtggaatctaaaaaggtaggtctcacagaaacagatcataaaaaggtggctaccagaggctgggagaggaaggaaaagaatgaggaaagtgacatattgatcaaagttgtacaaagtttcagtgcgactggagtaataggttttagtgatctattgtactgcatggtgtccacagttaatagtaatgtattgtatatcttaaaattactaaacgattaggtatttaatgttctccctacaaaaaaatggtaagttggtgtattagtccactttcacactgctataaggaactgcccgagactaagtaatttataaagaaaagaggtttactggctcacagttctgtatggctggggaggcctcaggaagcttacaatcatggtgaaagggaaagcaggtatgtcttacatggtggcaggtaagagatcctgtgtgtgaagtgaagggggaagagtcccttataaaaccatcagatctcgtgtgagctcactcactagcatgaaaacagcatggaggaaatcacccctatgatccaatcacctctttccctcaacacatggggattacagttccctgccttgatgcgtgggattaaaatttgagataagatttgggtggggacacaaagccaaaccttatcagttggtgaggtgatgaatatggtcattagcttgtctaaatttgtctgcaatgtatacatagatcaaaacatcactttgtaccccataaacatgtgcaattactattttccaattaaaaataaatataaataaattaaaaataattgcaaaggaaagctggctgtggagaagattaacaaataatgacattaagaaattcaggtccttggcaaaattagaaatacatacaaagctatccagaacttatttttccaaatgcattaggcatcctctcaccttaccctttacaattgcatggcttcagagattacacagaraacgttcagaaacattgccccagtagatgatcttgcaatgctatgaagtaggcagaacagctgtggctatagcaattgtgcagatagaacgtacttcatggatggcaagactgggactctaggacaggctttcaatccattctaccctgttgttgttctgaaatgaaagttttatctcccagtttatataggtagccttatctttgatgcttcaatacctgagacctggccagtgtcccttttagtgattgtatgtgtgtgtgtgtgtcatatgcaatttccttatagcaatggcacagtgtatcactgtttaattaaagaagagaaagaaatgccaaacatacgaataaagtctgaatatatctgtaacattaaaagtgtaggtgtctatctttgaagatatgtcttaaggacartgaaagagtcagtgagtaagagaagagagtcctgggatttcatacaagatcagtgttacttgatggtgtaggctcctaggtatttcatctttaggatataccgtctattacaaaagccaagatttttagatttggatcaacattagggaacttcattctaggcaagagccaggttttgcctttatgttaatatgacctcagctgtgagctccattttgccaggcatcttaaaactgcaacacatatcattggaatcttccgttacagtctaatacatagccacacattgggagcaagaatgaaatccaacccctgtcctttgcaaaatgcaatgagwcagtgtctgctttgggagcagggagtcagaatttcattgtggacaatggataaggtgagtaaaagggcttaaaacatttgtgctttcaagccataggctaggataacgatagtcagaactttttgatgaagtctgaccatgctacgccatttataaaattttgaagcttgtaagtattaccccaaaatgagcagtgtgaactcaaagggtttatcattgtctctcaggcaaaggtaatatttgaattatttagcaaaggactttgagcaattggaagagatactcagctgctggtctctagcgctctaacagggtggatgccccccgctctgccggcactgatgtttaagttgctggattatgaggaagtctggggattccttggggagaaaagraagtgatgacatattgaagcacaacgacatattgaagagactcgggggctggggtgataaacttcagagccgtggctatttaccaattggagtgtaagtattttaatattttaacaaacataattgccattctggtatgtaccaacttcatctcagatctgtccttaagaaataggcaaattctttattgcctctctgaatggttcatataaattcccaggctcccttagctcattctaacataaaactgtattaaaaataatgaatgtaattcatcaataattttcctttgtcatagcaaatagtcacaagtggattgagatcagagtgatcactcatatttgttctggggagaagggagcctgctgttttgctcctgttttctcctaggactagtattttagcttcaaatgataataccttagcacagactctgatattcctcctacatgcaggagcattctcttggaataattttggggatgccaattcaaaatttcagccatgtatgatttacttattggaaaataatcactgagcagcaataactccagcagttacttgtatcaaggtagaatcaagaaatagatggtatggaccaaacttgcttctctctaaatatgcatacccaagtgatttgggtaaaatgtttgtgaagggcttacatttcctgcaagtcagatggtttaagagaagtagaaattatgtgtgttttgcagcattttggtaatctgtgtggagtgtctgtagatatttctcatgagttcaagggaatccttttgtggattttgatgttcctattggcagagctgctgcttgactacatgatgtctttgtattaactacaaaaacatgccctatcatctgagtgattttctctgccagacccctttgtgcatycacactctgcacctccagtgtacggaggaccttcccactggattctaagattccatgccttcccaatgcatggcagtgtctctcatgcacatggcaaacctactctcttggatgtcactgccctgaaatattgagggagtacatttatctaggcatggtaccagggagtcatttagacatgtagggagtctagaaagatcattgccctgggagagtgctcagccatgctgagttctcctactttgttgctcatttctgtgtgaccttaggtaacatcctcttcaggactttttttttttttttttttttgacagggagtctcattctgtcatccaggctggagtacagtggtgtgatctcagctcactgcaatctccgcctcctgggttcaagcaatcctagtgcttcagtcgcctgagtagctgggattacaggcatgcgccactacgcccagctaatatttgtattttcagtagagatagggttttatcatgttgatcaggctggtcttgaactcctgacctcaagggatctgcctaccttggcctcccaaagtgctgggattacagatgagagccaccaaccctggccagsacataatttatttcaggtgaattgattgttggaggattttgatccaagcaatcaatgtcccttggtgttcctttcaaacagcagtaagtgacctgaatttattttccacatttccaaatcttaatgaaaatcagacaatggtctatatgttcatttgtgttcttacttaataaaatgtgggttttagacaatattttgccagtcatgaattcctakagaaggaactctttgggagaacagactagtgatctatagacatgatgacctccaactcagatcttctgtagctaaccactgaccgggagaacatgtatgaaaaacatcttcaaaggcattgaaaaattaacatttatcaaaaacaaaayacattttattwcatttgaacttagacctttactatctaatggctatggtactatttaaatgtcaaagtgtgatctagcatcagcctaatctggttagaaatgcaaactcttgggccacatctcagacttactggaccagaagctctgtgggtgggacccagaaatctgtgtttcattcacatgccctccaggggattgtcctgctaaagtttgagaatcatggaagctttttaacctctcattatagctttataagcagcaactcactggattcctatcaacatcctrtgagtgtcatttggacaagtatatttatacccatttgatgcatggtaggcacrcagatgagtcaaatgacttgaaggaatagagttttacataatatacttttatatatttatacttctaatatatttatactttataacagatttgactgttttatatattgcatataaacattatatcagtttctcctccactaaggctgactccaattttactccaattttactaccaatttttggaagaaagcctacctatcactcatgttctctcaagtaccctctaaaactattagttagatgactctatttaattttccatttatttgcccgtttcttgctacctttccccccaaaatgtaactgctaccttgctcaaaaggatgtgtctacttgggatatctagcacacacattttatgagattttaaaagacaacataaatggtaaactatatatttaatacaattttgaaagacaaaattttaaaattaaaaaggaagaaaaaaattaaactaaccccataattctcccacccatcattagcatgtagtttgtttagattcatctaccaataagtagaattgtacaaatttgatatcatgtaatacatgtcattttgtaaacttttttctttccttaatatatctatatatcataaacatttttctatgtctatattattttaaaattgtaatacccagagttctccagagaaacagaattaataggatctcccccttggagatttctcatctttttctctctcgatagatacagatagatacatacataagtctatctctctatctctatctttatctctaaaacacctatccatagatagacatttttaggaattggctcatgtgtttgtggaagcttgcaagttcaaatgtgcagagtaggtgggcaagctaccagggaaatgttgatgttgcagttccagtctgaaggcaggctccttgcagaattcttctttttcttagcagtcttacttccccttcctcttccccttctccttcccctttcccttcttcttctccttccccttcttcttattctccttcacagacttatttttaaggccttgagctgattagataagacccactcacattatgagggataatctgctttacctgtagtctactaattaaaatgttaatctcatctaaaaaacaccttcatagcagcattcagacatgtttcaccaaatatctgggcaccatggtttagcatattgatgcagaaaattgattatcataataatattatttttttttgagatgtagtttcactcttgtcacccaggctagagcgcaatgctgcaatctcagctcacttcaacctcttcctcctaggttcaagcgattctcctgcctcagcctcctgagtagctgggactacaggcgcccatgaccacgcccggttaattttgtgtttktttagtagagatggggtttcaccacgttggtcaggctggtctcgaactcctgacctcaggtgatccacccgcctcagcctcccaaagtgctgggattacaggcgtgagccactgtgcccagcaataatattaattttaatgggtgtgttcatttcattttatatatgacctacaatttaaccaatcccctaaggctggatgttcaggttcttaatattttttgcccgtatttacagacacctttgactattggatttattttgttcttcaggaacaatatacaaagtgtggaaagaaatgtatatttctaatcattggaaaataaacactgagcagaaataactccagtagccatttgtatcagaggaggtagaatcaggaaatagatggtatgggccagactttcttctctctttaagagatttgacttcatattgccaaattgcccttctagatgtctttactcatccaactacaattcaaaggtttgggagggtaagcaatgccaggcccatcttgatcatcccctttctttctcagcctgtcagtccctgggaacgggcatgatgttgagttcctgggccacctcctcaattgaagaagtggcggaagctggtcctgaggcacttcgttggctgcaactgtatatctacaaggaccgagaagtcaccaagaagctagtgcggcaggcagagaagatgggctacaaggccatatttgtgacagtggacacaccttacctgggcaaccgtctggatgatgtgcgtaacagattcaaactgccgccacaactcaggtaaccaygatcatgtgggccccgagctgaggcgaaagggatcttgactgggaatgttagggtctgggttctactgatagcaacgttgctaaacatctagttaatcttcagctaatcacatcccttttgtagacatcactttttttgagatacacaatagaaacagaaatggcctctataaaagtccaataaattttcagaccagagtgcattaagggctttggctttgggaagtatgaattgctatacagatggaagatactgaattttgcccaagcagcagtttattattatcatcctggtgccctatttctttgttaaagtcaaagagccacctttaccttttatttttaatggtacatgggacagctaaggctaagaagattgaagaaagaaaataatgaaggtttaaaaaagccacatctttgatccctcactgtctacttcttctttcagcaatattcctttcactgtggttcatccatgggtcaagattcattgattcattcactcaaatcattcatcttagcaaaaacmatatatcacataatctgatgttgaactataaaggtttcatcaggtcattcattcaccctgtccacaagctgtgaattattatctctttcctggttgtattttgggattacaatcatcttgagtcaaagctggaaactgagtggaagtctctgggaaagactcaaacctccttaagctatacacctcttttccccatcagattttccttccttyagtttccaccaaaatgtgctcttggatttttcatatgaatgtataatgtacctcaggcctataagtattttaaaagggatcaaaatcttagttttaatggaggacatttttatgatggactcctacagmatccatcagaatatgtaagatgatgaggaatgtcttcctgtgttcccagatctcatgccacagaggcccttgcttactctatgtttgaattgtatttggaaaaaaaaaaaaaaacaaaaaactagggctagcaaaattgaaaaaagataaaagacgaaagaagccacatgtaaacatactgtgtttactcttctamaatattaaaaaatgaaaagatccaaaatcaaattaatattcccctggaatttcatatctatttcagtgactgtggagtgaatctcaccacgaaagytgctgcagtcttgtataagtttcacatagttttactgtgtttgtgcctatgtgaraataaactactgtgcataaaatcttgctgttgagccatgtgtgaattagctgtgtgatgttacctccctgttactaccaggctggtttaggatatcatttctgtatgtggcaccaggattagaccaatgacagaaaaagaaagtgctctccctgccaaactggccaataaaactgttccacatatcccagactcagggttacctaaayaacctgtgtttaaagagaacaaaaacaaaagcctctgacatagtcttactccttgccaaattcgtcagaaagctgatggattcaaattcccccaatatgaatcccgtatttacattatttctctattttgactactttttttttttaaagactttctaaatagtttcccactatcgaggcttcttagaggaaacatttctcattatttccccttggctatttgaaaaggaatttgttcttccttttcctccatctcttaacactactactactaacaatagtaacaacaatagtaagtacagtagggttttttgttttgtttttaacttaagacatactttcttgttctggataccaaaatatgtttcacagaggcatctacttagatggggtgcagatgacacagttgttaattctggcaggtacctcttgcttcttcactgctggggctactcagtgagtggcaggaaggttgatttgctttccccccttttcttttgctcctgggctccttcccagatgatgtgacgggccatgaaacaaagactcttttcagctgtcggtgtgcatagaactggctgcggcttcctagcttgtcacatctccggtctgaagatgatcaaataatgagcaacacatccaggttatagggaacacgggaaacaccmcgcagctgggtgtaccccagcccctcagagtgcacattggtgttgtttgtcctagtggacttcggagtaggccagtgccttctggtcagttcctcagtggcccayattcagctcttaaaggcagagcatgctaacgggaggtccaggcttcygcctgaggccaaatacaccccaaaagctcatctgttatagcctgatatgaaatcggtttctttctgcaactgacctgactcatagaaagtgaagcctggcttttcataagtgaagtttggcaggcaagggaggcaggaaatccagaggagaatgagcctgtaaagcatggctccttccagcccttgttacttcctctgcccaagtgtgggggagggtccygtctcttggcatctgggcccagcaagagttcagaggtttggtagtctctgcttggtccatatgcaaaacacatgtatgtgtatacattattaatggcaagggggttcctgaaactgagagggagtaaggagacttctcatctgctcttggaagaagcaaggaatgaagccagttcagtagactgattcctgaggctttggggcaggaactttttctttctccatatccccatggagatggttcatttaccctgaattaagatttggcccttcrgtgcagtgccaaggcagtttaaagagaagaaaagtaatttctgatcattgactaagatcaaggtaaatcatgacacttatcctttctatgatttgccagtgacatgttttcttaagcccagaaatgatttattgatcgcagcagccagaatatatcacactaaaacagatcagcctgccactgtcttctcaggtctctcatgattaaagtggcctgctttaaagtagactcaatgtgaataggtctccatgacctctgcctcactgcgtagcactcacatcctcacccactcttgcactctggcttccctgcggttctttcaatatgccaggcatgctggaaccccggagcctttgcactggctgttccctctgtctgtaacagtcattcgcagaatcaacgcatgactaatagcctcacttccattgagtcttgacattaggaatggatatacatgtctatattgggaaaccacaataaaaattgatggtagagatgcaaatatgagcaagataacagggtgggggcaggggagagaggtcagtggaggacttggcacagtagcctcttaaatggcacaatagcctcttaaatttttggttaagaaatcattcacattgataagtatggcaggataaaggtgtccatgagtgaatcccgggaacctgttactttatgtggcaaaagggactttgcagatgtgattaacttaaggggcttgagatgggaagatttttcctgtttttatcagtaggcttgatataattaaaagggtccttataagagggaagcaagagtgtcagagtcagagaaagagatgaaatgacagatgtagaggttggaatgatgtggtcaggaaccagggaaagcagggggtatctagaagctggaaaagacaagggaatagggcttcccctagattctccagaaatacagccctattgatatcttgagtttagtccagtgagacttattttagacttctgacatttggaactgtaatataataccttcatgttattyttattgctgttgtaacaaataaccacaaacacagttctactaatttctttctcaaggtagcttctcaattttgccaacgctggttaccatacatacttaaagtttcattttgagtctctgaaaactcacatctctcttaatctgctctacttttttcttggctttgtatagtgcttatgttctgctacactttgtaatttattgmttatgcttaccatgggcagggattcttaactgttttatttatttatatatcttaaacattgaaaacactggcatgtagtagatgctyaataagtaattgttgactcaatcgataaaatatactagaacatacaagattttcccaatgtaacataactagtaagaggctgaaccgggatttgaactcaaaattcattccctgaaccttcttctagcagccacattgaggaagaaattaccagggctgtgttctcaacacaagtgttttccgaaccacagaattaaaggctggtggcccatgtatcagtgtctgtatttatgagcccctctttcaatctctttcttttcatattgtgttgatgctgtagcttctactggtcatgttatttttttgtttcccaagacggaattatgtggctttatctttaatgttgcattatcaatacttataataaataatattatgtattactcaatattcatgattattagtgttactattggttatttaataatgtttaacttacattagcagttgttactatttttatgatgctaaattactaacagctaaaacaacttctatattaaaaagtatatttgagtgtcactcaagagataatgagtaccttacaaagaagaaatcttgtttctcacctttgcgtcattaaacagatcaggatttggagaattaagccctaagtaatagtgttattattttgatctcacccctttttttcttatgaaatggaatactttggttatcagaagccactttaagcatatatatatatatatatatatatacatatatatataatatatatatatatatatatgtcataatccgaataaaaatagcattcatggaggtttcttttggagcctttggtaaaacactccatcgtgggtctctgtcaagatatctgaaaactttttcttggcttctggctttgaacaaagtttcagagtaacaacaaggcttcattgtgcactgaaatttctgtaaggcaacattcattcaagtgttgattcgcatttcaccatccaagaataacaacagttatttatataattttatccacgtttctgttttttcctatccatttcaccctttcaccccacccctgctgaaacactggagcttgtttgggatgggggtggggtgccatgcagactacatacacatacagatgtttttctttttcttttcccggtcttgctatgggatagacagactggactttttcttattaacaatattatttaaaagcttggaatttattatcatttaatcatttgtatgtaatgaaataggtctccatggtaaagatgtgtttattgaccagcggttagctttattcaaattagggtgaccatagaagaccaaggactatgatataatgtacaatcctaagtggtttgatttaaataaaaagaaagaccaggcatttcagctaaaatccccaccaaagcccaatgactagatgggcatccatatgactcaatgaaattttctatgatcttaaatggccatctgagtccgtgaaactataggactaactattcaatccttattgagaaagccttgttaatagcttgaattgagttatatgggataggaatgttcatatctttatgacaatatatgccacctaagctacataaccagctgtgttagctaaaatactctaaagtgtaaaaaatcatagttttctattaaaggaagtcatgattgttaaaaataatttttaaatagtgtgcctagattcttctagtataatatataattttttttttttttttattttgagacagagtcttgctctgtcacccaggctggagtgcagtggctggagttgctcactgcaacctcgcctcccgggttcaagcgattctcgtgcctcagcctcccaagtagctgagattacacgtgcccaccactatgtccggctaatttttttgaatttttagtagagactgggtttcatcatgctggccagactggtcttgaactcctgacctcaggtgatctgcccacctcggcctcccaaagtgctgggattacaggcatgagccattgcgcccagccgatatataaatttttatatggctccatgatcttctctacatttaatgacagaactggtggaggggaagaaagagatgggactaagccagagatcaatatacatacaactatactttgaccaaaaaaagggagattgactggcaggggaattaatagtatgcagaagagcaaggtgagtccagtcactgtcattattcaaaaacagcctttcaggagaagtttgcaactgaatttgggactgtgggcagataagtcacaggaatgattctattgtgtatcctgaagtcatccatccagctaggagtcagaggtgcaggctgaaaagacattgcccctagagtggggaactgccaaaatctagccaggatattaggccaagagaaaagacctcaggcacaggggaagccagcttcagaatcttagaggtgagttagagaaatactgggctaagctgggtcaacaaaaatagtcatacgggaaggaagcaactcagtggtactttgtctcaggttgggttctcctagaagcaggctgtgagcctrtgatttcagtgcaagtagttaatagggaaggtgaagggaatactgctagaggagtaggaaagtgaggcaaaggagggaaggcattgaacaaagggcataataccaagacagctacagtcggggcaactgaagcttaaccctgctggaaaattctgggaacttaggcagaatttatctcagagttagtctacctagcggtgagggagctggggtatttacacttcaacatccctaatgcctccagtctgctgtgtggrttgtgactcaggcccaggagcaagaaaaaaccactggcagagaaatgaaggtattgataattgaaaagctcttgtcgttgtcaaacttgtctggaagattagagaagtttgagtcagcagaccgagaagttcagagagaacaactaaaagggggagggaaaggcaagaggtgacaactcatctgctgggaaacagttcccacttctcccatgcccaccaccaccatcactactgcaatagcaggcaagaaggagtctacaggggcaacagacagtcrtgttaacacctgttactgcggttccaacctcttctagaattttctacaagggcattggaaggtttcctgaggtcaggtgcaataaccaggaggaaactgagatctgagcaaagagaatagtgttaggaatgaagtcaagggacccagtttggagctcaaatactgctattagctagttctatatttgaggcaattcattttgtacctctgtttttattttctatgggaatcatagagtatcaatgttactttctaagagtcttttaaagaaaaattgtgataattttggcatacaaaaccctttgtaaattataatgcaccataaaaatgctttttaaattgtgattaatttgcattgctggctgaaaatcgtgtcaactctattgtctatatccataaactggcttaaaaatgagatgtttgaatatgaacacatttttttttcttgaaacagatttgtttgtgtaaacacagcctaagatgtaaaataaaatttaggtcactgattaagaccactagagtatcacatttagtctagagtcctacatcaaaatatggaaaatatgtgtgcaattgacttatagataaatgagcagtgaacagccaattgatttgaaaagggtaacatttttcattgaatgaatcattggaaasgtatttctaatttggcaaatttctcattttatgcatttcttattttaggatgaaaaattttgaaaccagtactttatcattttctcctgaggaaaattttggagaygacagtggacttgctgcatatgtggctaaagcaatagacccatctatcagctgggaagatatcaaatggctgagaagactgacatcattgccaattgttgcaaagggcattttgagaggttcgtttatttctctacttgaattcatactgactttgtgatcctttgtggatacgttcataatattcttaaaggaaaataacaaggaaaaattaacatggaaattgagagagacattccaactctcaattctctgttttcatgttagtgagtaaatatttcttcattcttaggtaatattctgaagcagagctaaactctcatgaagcacaaagtgagctttttcaaagaattgggatgctattgccttatttcagagctgttactgaatcatgaagcctggcaagatcttggtagaacgtcatgagttcattgctttacctgaaagctgcaacagttgctctcagaccaaagagaagccccaaggagatattatgacagacagacttgttttaagagcttttactctttttcttgtgctccctccagtacaaatggctaggactagtttttgagtgtggtcaaacccacatcacctctctgaagagaatggctgactagtatggtcaaatgctcaattatcaagccatgggtaataagaaacttaactatttcctccagcatccccatgtattcagatcccacagggagataccaatgactataataattttggagtgtaaatgtgtttacccacaaaggcaagaaaacctttgtrgtatataacctttggttatatagataactgccaaaaacttttttttaactgaaatgtttgagtaagtgactttaagatgagagtctgtccattaatgtatgtctattaaatgactttgaatcaaaactttttcatagattttacttgaacatgtctgagtcatgtggtccctatttataaaggtctacctactttgactatttaattttatgtgtgaagaaatgagcttataaaagtaaaagaaattaagcccagtgcagcatttaagtagtggagatatgtttaaatccagatgttcttattctgtgcttaaacaaattaaattagttttttaaatcgatatataatagttgtacatatgcatagagcatatagtgatgtttcaatacctacaatgtgtagtaatcatatgagggtaattagcatatccgtcatctcaaacattattctgtacttctacaaaaattgttcactgtttcctactaatcattgtcctagttcaaaatttttgtggattatacttcaatgaatatgtattggtttggtttacagacacctttaaataatggtttcacttcctttacttgcatccatgttgttatccatgattactagtgctacttactgtggctgcattcaactgtggggactaaataatattaacctgaaggttctgtgccattcatttatttattcattcatccattctcttattcactcactcattcattccataaatatcataactactgtgtgctaaaatatttttatgaaataaaataattttagatccttggataaaatgacagtctattcttgtaggagacagttatataaacaagcattttgggtgcaataaaatgttgcatagaaatctatgggcatggcttaaaaaagaatatgggcaataatgtaagagtgggttagaaaacacttttcagaatgaaagatgatgcttsagttttgccatgatatcaagccaatagactctacttcagactgaagtactggcagaataaagcaattatgcataacaatttataaaacacataagccatttagagaatttagactttaaagtggctgagaaccamtgaagtgtcttgatcagagaagcaacctcatcatataagcattttacagaaatcatgctttgcacaacggacctaatggatggaggtggcaaaattgtggtcagggaagacatttaggaaatgttgttgcccagaaaagagataattgtagagatgacctagagtaatggcagggaggggactgagaaggtataattaaattagaaaattaagacagttaatcacagagacggcccaggggatctggctttaaaacactaaggaagaatagaattttagtcttgttccataattgtttcaaataaggaacaaagaaggaggtcattttattttttaaccaccttttcaatctaggatttccagtgtatatcattttctacaactttattccttaagatatgtgcaaatcaattgaattagatttactatcacatgttatgttgaaaaatattttggtttctagatcttcattctgttatcactttagctaggaccactgccaccaccaccaccaccaccaccaccaccaccaccaccaccaccgctaccacaayctccattaccaggacaaccaccagcactgctgccacccaccaccactgctatcaccatcaccactcccatcaccattatcaccactcccattaccaccatgaccaccaccaccaccacaactaccaccatagccacaacctccatcaacaccaccattaccaggaacaaccaccaccactgccaccaccaccactgctatcatcaccaccaccatcaccactcccatcaccactrtgaccaccaccaccaccagcgccataaccacaaccaccatcaacaccaccattaccaagacaaccaccaccacctccaccaccaccaccagtatcaccactaccacctccaccactcctatcaccaccatgaccaccatgaccaccactaccaccatcatcaccacctctcttttcttctcatccatatggatttctggtttgtttctaaatatttttgtgacattttacacatagtagatagcccaaatatttatttactgaacttcttgatgaaaactataagtctatctaattagagaaagctcaaaaaaaaaaaaaagataaggagagatgggacatttgacatttaaagggaaataacttatttatacatgtacagtttacatcgtctacttttctgtaactatttggttcttttatttaacaaacaagaatcatctctatgacaacaattgcaccaagtaacacatatgctcaatctggatcggaagggagcagtggcagggccagttctgggaaatccaattttctccatttcacaggtcctcatgcagaaatcacatggattgactgagagtcacccatcctctttcattttcctttttcagaaaagtgcagattatattttcaggaacatgaaatcatgagcaactgtgaagatctagaccaaacatctgactgtctcaccattttaataattgtattttaatgaatgcaaattagaatggaagatgtaatctcttactgtgtgtggttaaactgcccttagagaacttcaacgcaagctcctaacatgtacttaagacagaatttggtctttgtcagaactcacactagcaaacaaatggcttttttcagcaaaggcatggtgccttttagagttcttttctttttcttttaatttatttaaattaggctgtctcacttctactgtggctttgtgtttctgagaaacttttctctagtcagctcttcatatacaggcatacctaagagacattgtggattcagttctggaccaccacaataaagcaagtcacataatttttttgtcttcccagtgcatatgaaagttatgyttttgctatactgtrgtctattttgtgcaacagcattatgcctaaaaaacaatgtatataccttaattaaaaaatacgttactcctaaaaaatgytaatgatcacctgagtcttcagcgagttgtagtctttttgctggtggagggtctttcctaggtgttgatggttgctgactgatcagggtagtggttgctgaaggtttaaggtggctgtggtaacttcttaaaataagacaatgaagtttgatgcatcgattaacttttcctttcaggaaagatttctctgtaccatgagaagctatttgatagcattttacccacagtacaactttttcaacattggagtcagtcctctcaaactgccactgctttatctgtgaagtttgtgtaatattctaaatcctttgttgttatttcagcartgttcacagcatcttcaccaggagttgattccatcccaagaaaccactttctttgctcatcataagaagaaactcttcattcatttaagttttatctcatgattgcagcaatttagtcacagcttcaggctccacatctaattcggttatcttactgtttctgccacagcagcagtgactttctccaccatagtcttsaactcctcaaagtcatccatgagggttggaatcaacatcttccaaattcctgttaatgctgatattttgacctcctcctgtaaatcacaaatgttcttaatggcatctagatggtgaatcctttccagaaagttttcaatttattttgctcttattcatcagagaaatcattaactatagcagctataatgttattaaatatatttcttaactaataagacttgaaagtcaaaattactccttgatccatgggctatggagtggaggttgtgttaacaggcataaaaacattaatctttttgtgttcttccaccagagctcttgagtcactaggtgcactgtcaatgagcagtgatattttgaaagaaatctttttttttctgagcagcaggtctcgacagtgggcttaacatatttagtaaacygtgttgtaaacagatgtgctgccattcrgactgttgttttatttatagagcacaggcagagtagatttggtataattcctagggttatatttgcagccatgaatagacttctcctctctagctatgaaagtcctagatggcatcttcttccagtatgaggaaggcttgtttggaagaagatgccatacagcctgtttaatctacattgaaaatatgttgttcagtgtagccacctccatcaattttcttagctagatctcctggataacttgctgcagcttttccatcagccctcagctgcttcatcttgcacttttatgttatagagatggctccttcctttaaacctcaggaatcaacctctgctaacttcaaactttttttctgcagcttcctcacctctctcagcctttatagaattgaagagagttagggtgttgctctagattaggctttggtttaagggagaatggtggctggtttgatcatctatccagaccactcaaactttctccctatcagcaataaggctgctttgctctcttatcatttctgtgttcactagagtagtagctttaatttcctttaagaactttttgtttgcattcacaacttagctgtttggcacaaggagcctagcttttgtcctgtcttggcctttcacatgccttcctcactaagcttaataatttctggtttttaatttaaagtgagaggtatgtgactcttccttgagcgcttagaagccattgtagagttattagttggtctgatttcaatattgttgcttctcagggaatagggaggcctgaggagagggagagagatgggcgaatggccagtgagtggagcagtcagaatacacacacttattaagttcctcattttaaaggcgatggttcatggcaccccaaaacaattacaatagtaacatcaaagatcactaatcacagatcaccgtaacagatgtaacaatgaaaaagtttgaaatagagtgagaatgaccaaactgtgacacagggatacmaattgagcacgtgctgttagaaaaatagtgctgatacacttgcttgatgcggggttgccacaatgccacttgagcattgtacataccttaattaaaaataccttgctgctaaaaaatgctaatgattatctgagtcttcagcgagttgtagtcttcttgctggtggagggtctttcctagatgttgatggctgctaacagatcaaggtggtgatttscaatttctaaaaaactcagtagctgcaaattgctataaagcaaagtgcaataaaacaaggtatgcctgtatacattgttcaagatactctaaaaaaatatgcgcttaatgttcctggattgtgttttaaaattgctgtcatgtgtccgggatttagttactactctcctctgagtcagaacagattcctaggccaaaagctccaagggcttgagctcaaatcttgagtacttacgttttgagtacttgagtacttatwtttcacttttataccttgttttaaattaaatatggaaataaaatattaataagatagcaaacaatgccactgcccattgacgactgtgtctatcaatcaatgtacttaatggcaaattcacaaatatggaatgccacactcttaaactctaagaattaataaaaatatccaagattcatgaacattttgctaagtgggaatattttggccctttcattaaggcaaaattgcttttctctctgtgttaaaataaattgtaaaactgtggacgaggctgcataagcagctaataaaaggggcttatatctggttataaattatccttattgtctttgcttctctagaaattcacaatcctatcctctgagcaaatcattatgtcatttctccctatattcccaatactacctgaagaatataaaaaccacttgaaatgatggcagataacagactgttacttaagaaacatttaattcaaatgggaggcactttatcatagtaatcttgactaggataaaactgttataaacagaacccaaatagagttgccaaacgcatcctgcaaataaatctttctccacctactcatctttttagtttatattccctgcaccatcagaggaaaatggtaataatagttaatatttatctgagtgttcaacatgtatcaggcactttctaaacacacattcaactcatttaatccacaagctaatcatatgtggatctctatcctcattttatggcttaggacaatgatgcaccgagaagttaagaaacttgccacttacacagcaagcgagcagcagatgtgggatttaagtccgggtggactgatgacttaccttaagcagtgaatcacttcttcctcctgtacaggatctgtttattgataatatttaatttctcataatgcaggttgtagctacatggtggcagacacaggaatataaactggagagctatacgtatgctcaattacgaggtttgaaaaaataccattgtctatgtttaagtggttttttgtttttttttttttacatttgacttgaagttcaggatcctgtacataactagataaccaggcaaaccacaccaattcagaatattattttatactgtttaataaggttatttatgactacacctaggtttttaaaataaataccatgctatgtctattaggacaggtaagctcatggaaacattgaaggtgagctgtgcaatatgacagctatataagttaattaaaatgaaatagaggcaaaattccagtttcttagtcacactgccacatatcagttggtcagtggctacatgactagtggtactgtatgatggaagtgcacagatctagaacatttttattatcacagaaagttctatggtagtccattgaggccctatctttagagaaccatttatgaaatacgtttgagatgaaagtgtactgggcttctggtttaaaatgatggactgagtacatatgaattctcttgttaaagtcaagactccactgaaattaaagtacagaaatgcaaatatgtatacaccaatgacagcaaagcaaaggaggatagaggacagaaacagcagagaaattttaagaaacttttgaaagcctgttgacagcaggaaaacatacagaaaactgtaccttgagataggctttcaggaaatcctagaggaggtaggggtagattatgtaatagaatgcttgagaggctgtaggtatatagtctgcaaggatggcagagagggtagtgaagacgaaacgcaaggggactgactgaagatcaatataggaagctgttatgcctgccagcaatcctgctcccaccctacttcttatgcaacagtggacacttggcactgacttctcaataagaaagtagctgatcctttctaaagacattaatgaatggctgggatgaaatatgggtgggtggcatttccaatatgacatgatgctgtcctgattctgacacttgaggagctcacagtctaattgcctcttagttgacatttcctgcattttctacatggagttccaagaaagaatttccactccagacaaggacttggcaagaatgaaactaatttacaaaacagggcagttcctcaatctttcttccttaaatataaatggaaaatttagcatcactaggcatatcagaaacaccaaaacataacaaatcaagatgaatctatagaaaagcttatcccaggaaaaagagataaaacaagaaaaagaattttaaaaaatccaaatgatactcaaaaaagttgaaaatatacatataaataggaagagtctgccatgaaaagaaaattagagcataaagaagagttcccaatgattagaaaaatgacttctgatttttttaaaaaaggggaagtcgaatataaaaaagagctctcaaagattaaaaacatgattgctgaaatgactgaatggctgagcagtaaagtcaataacatttcccaaagggtaaaacaacaatgagaacaataagataaatagaaagaaaaaattattacatgaatgtacatgaagacaactttaaaatgtccaatatycaactgataggagtttcaggtagaaaagtaaaagaaagaggcctggaggaaattattaaagaccaacaatttccgaatgctgataatgtaagtcattagagtgagaaaacaaatcacaacttatcacgttccttatgaaatttcagaaaagtaatgtgtataaagagataaaataaacataaaactgtttacttataaaataattcaaatcaaactggtgtcagtccttgcatcagcaatgggtactagaagacaatggactgatgtctttaaggttctgaggaaaatggtttttccacttagattattatacccaatccaattgtcattcacacacaagagaagctatttaggtggtctgtaagtttacctcccttggatcctttttaagaaagtaacaaaggaatctactacaaacaaatgagaatataaaccaaatgagggcatactcagactacaagatattcaactcagacagaagaagagcaaactcaaagctgaaggcagacattatgtcttgtgagtagccacaacagaatggaacaggaaggcagagggctccaggggttatcttcaggtggggaataaggtgacctaataggttagatcaaataattgaaaagtttgaagaactkgataatattctgaagtttcacagtaaatggaaaaaagaaaagaaaagaaaggcagttagaaatctaatctaatcctaatcacctcccaaagaccccatctccaaatgccatcacattggggatcagagcttcaaaatacaaattttgagaggatataaatatttagtctatagcatataggtttaacagtttcctatacctataattttaggagaaaaatatcactatcatcatttgaaaaaaataagaatagttgaaaaatagccttgtataaaacaaagtttggaaaatgatagcatataatttataaaataattatcttgtcttttaaaattaytcttagtcaagtctgcccattatctccattgcttaattttacagattaccaatgacctatacccatttgcttaaatttccaaggcctgatttttgctacgctcttgaaccagttggttttgcttagtattgcattttgaatgttaaacctgagaaccagtgttgttttcatgattcttttagcaaatggtttgttattaggacatgctaaaaataatagtttagaatataaaatatgtttttaaatgttgcaagtagatttaagagaacagtaatctatttttaaactgaamtttcagaaattaatatattttaaaacatgattagagatgtagcatagaattttaatttttttttttttgagacrgagtttcactctgtcacccaggctggagtgcagtggtgcaatcttggctcactgcaacttctgcctcccaggttcaaacgattctcctgcctcagcctcctgagtagctgggactacaggcacctgccaataggcctgaggcctggttaattttgtttttgtttttgtttttttgtatttttagtagagatggggtttcaccatgttggtcaggctagtcttgaactcctgacctcgtgatctgcccgccttggcctcccaaagtgctgtgattacaggcatgagccactgcacctggccaattttttatacatttcaatgagcaaacatatatttaattatagaacaatattacttaaaatagttactaaagctattacaacttgttattaaagattgttttttgaaataggtttgtccactgcctgttacatttacagtgcttgacatttttatgytttttttttttttggctatccaaattgttgaggaataattttgctaaatgataaaatggtataatcttattaattgaaaatatttagcaagagtatacccttataaagataaacacgctttatgtcaatgtattatctattgatacttttgtatattttacaattaaattgccgtaagtagtaacatttttttgttgtttttggccaagaaaactaccactaatattctagcgctaaccctagggtatacttttatgctaagattattgacccaggtatgcagatgggagtcagcctccatttgactggaatgtggaggcctctaaacccaagctgcctgttaagttacagtttccctaaggtgcttgttttactctctccaggtgatgatgccagggaggctgttaaacatggcttgaatgggatcttggtgtcgaatcatggggctcgacaactcgatggggtgccagccactgtgagttttggcagacgctaagatttccttttggagttcccatttccatcactgtgttactatctctatgtcttcctcctctctgtgtgtactttgtgtaatcactcaaggtgaaatacgtgcaaatatgtgagatcttggattttaagtttagtggcacataactacccaagttaaaaatttatttatgtttaattagcccagtgcatttatttgtaacctatgaaagtctctgttaaataataagtcatttgtgggcaaggattattctggcattcatagatacaccaataggtatgtaaactggagtatgaaagaaaggattatgccatgaatgtccaaggacatgagctaacagagaattgtgggatttcaaaggctgtggtagaatctgagatcatcagtacaattgagacaagaaatcaggaggagggacataatcagaatttcctgtggggtggcggttgaaaagctgcagagaaatggtggagagttgggaaaaggagaaaaaaggcttaggtccgggcaacgggaagtgagctgcaaataggctactctggctgagttgtgaaccaccttggctgcacattggaatcatctggggaactttaaagaatcctgatctgctccccaggtctatttatcagaatctctggttggggcttaggggtgtataggcactagtatttttttaaagctatcaggagattccaatgtgcatctttggtttttatgcactggagtaggcaaatcagagtccaaaatctagatgtaaaagtgaactaaactgtcctgaaaggtgtgggactgaatacaactgtatcgaagagcaattagaccctgaagatcctaaagccaagaaaaccgacagaggcacttagggcagattttaagatcagagactgggggtccagaaatggatccgaagccatggagagggacacatttcctggggtggattttatggatccatgatccagaatgggggccgggggccgttggtggggtgctatcaagtggttcccttatgtgctgtccacttgtggggatttggccaagcctcttgtagatggagcaatgatgttgcagatattttttgcttctgctctggccccatgtggaccctctttgcagtgtgataagcctaagagtaaaatgggaaagagtgagatgtgctcagggaatactaaataatccatcttgtttgcagtgtctgatgctgtaactgcccaaccgtttctccttgtccactgtatagacagagccaatttatcaagacggggaattgcaatagaggaagagtttaattcaygcagagccagctgtactgggagattggagttttattattactaaaatcagtctctctgaaaaactgggttttagggtttttaaggataatttggtggggaaggggttggaaagtggcgagtgctgattggtcaggtgggagataaaaatcatagagagtcgaattgtcctcttgctctgagtcagttcctggttgaaggccacaataccagatgaaccagtttatcagacagtggtgccaactgatccaggtacagggtctgcaaaacatctcaagcattgcttttcggttttacaatggtgacgttatccccaggagcaatttggggaggttcagaatcttgtagcctacagctgcatgactcctaaaccataatttctaatcttgtgactaatttgttagtcctgcaaaggcagcctagtccccaggcaggaatggggttttgctttggtaaagagctgttatcatctttgtttcaaaattgaagtatgaactaagtttctcccaaagttagtctggcctacactcagcaatgaacaaggaaagcttggccgttagaatcaagatggagtcagttaggcgagatctctttcactgacatatttttctcagttataatttttgcaaaggcggtttcagtgggagtgggagagttttgggaaatgcatctgcctggatagataaggaaggagatccttgactattatgagtcattgggtgtgcaatagaagagccttggcttagcagcaatgagtctcataaagtggattttgtcatgacaagaggcagaaaggccaatgaggtagtctttaaaattaccatagccaagaaaagagagaaggagggcctgaactgcagaaggacagagggaattgctttctgctccctatcttggtttcttcatcttttaaaatttaaacctttcaactgtaatatttcataatgtgatttacacaggcaaagtaactagcatcatataacaaaactttatatatctatgcatatttactaagtaatatatatatttgtcatatatatatatttactatctatctacctatctatctatctactaagtaatgtgggtgaactttccagaccaccacctctctcagaactggattcttatataaatattttcccttttatcggaacccttcagtggtagttattatatagatggttggaattgggatgaccatttgaatttatccacacaactggaaaaagagtagaacaaatactttagccaactagtagtggtctgttgtttcactgaactagcaggttgatttagtgacattcatagaccaattgtgtggctgtgatggcggagtaaatgatggcagggaataytgggtgtgcatattgcgttgagtttttcctaaagcactaatggtaggaaccaagtaagtctttgtatattgtaggattatacagtcaagtggtggctcacgcctgtaatcccagcactttcagaggccaaggcaagtggatcacttgaggccaggatttcgagagcagcctggccgatgtgtgaaaccccgtctctactaaaaatgcaaaaattagctgggcatggtggtgcactcctgtaatcccagctacttgggaggctgaggcaggagaattgcttgaaccagggrgttggaggttgcagtgagccgagatccatgcccctgcactcaagtctgggcaacagagtgagactctgtctcaaaaaacaaaacaaacaaacaaaagatgaaaagtaatgaaaactggaagttgtcagctctttgcaactcagttttgctcccagagacacactgttctaggtgatattaaatgttggttgcaggtaaacagacgtggaaagtgaagacctcctctgagtagggtggagaggttggtcacagcacaaagctttttctcagattcatgactcacttgtgtatggagatgtagacttagtgggcgggccaaattgttttctaaaaattaaatataaatctactgaaatcaaatctaactagattttaagggaaaaatagccaaatggtgttgcttatttccctctcgctgagagaatatggacacgtctagaagggcttttgagtttgttccctgagaccgttttttaaaaaacaataaccgaacctaagacttgaagctataaaaattctgtaagataacattgaaaaaacccttttagacattggtttagggaatgatttcatgaccaagaatccaaaagcaaatgcaatagaaacaaagagaaatagctgggagttaattaaactaaagagctttttgcacagcaaaatgaagtcagcagagtaaatagacaatccatggaatgggagaaaatcttcacaatctatacatctgatgaaaaacaaatatccagaatctacaacgaactcatacaaataagaaaaaaaacaaacaatctgatcaaaaagtgtactaaagacatgaatagacaattctcaaaagaagatatacaaatggccaacaaacatatgaaaaaatgctcaacatcactaatgatcagggaaatgcaaatcaaaaccacaatgtgataccaccttactcctgaaagaatggccataatccaagaatcaaaaaacagtagatggtgtggatgcagtgatcagggaacatttctacactgcaggtaggaatgtaaactagtacagccactatggaaaacagtgtggagattccttaaagaactgaaagtagaactaccatttgatccagcagtcccactactggctatctacccagaggaaaataagtcattattcgaaaaagatacttgcacacacatatttatagaagcacagttcacgattacaaagtcgtggaaccaacccaaaagcccatcaatcaatgagtggacaaagaaaccgtggtacatatatatgatggaatattactcagccataaaaaggaatgaattaacagcatttgcagtgacctggatgagattgaacactattattctaagtgaagtaactcaggaatggaaaaccaaacatcgtatgttctcactgatatgtgggagctaagctatgaggttgcaaaggcataagaatgatacaatggacattggggacttgggggaaagaatagggggtggcaagggataaaagacaacaaatatggtgcagtgtatactgcttaggtgatgggtgcaccaaaatctcaaaaattactacttaagaacttactcatataaccaaataccacctgtaccccaataacttatggaaaataaaataaaaatttaaaattaaaaaacaaacaaaagacaataaccagctgggtacagtggctcatgcctataatcccagcactttgggaggccaagacgggcagatcacctgaggtcaggagttcgagaccagtctggtcaacatggtgaaacactgcttctactaaatacacaaaaattagccgggcatggtggttggcatctgtaatcctaggtacttgggaggccgaggcaggagaatcacttgaacccgggagatggaggttgcagtgagccaagattgtgccattgtactccagcctgggcaacaagagcaagactctgtctcaaaaacaaaacaaaacaaaaaaaaacaaaccataaccctcctctttgcatgtcgtatacatgaggggagatacttgcttgagttttgcctcacactttagagcaaatttaaggctcatgatgatgagagaaatgtgagaaagcatttggtgtaccrcaaagtacaaagttccctcagtgtgtgggtttttctgtgagcggtaaaggtcttgggggaggctgtggtgtccaggtctcagtacttgcacagaagaacttgctatactgcagattttgttatgtcataagtcagagccatggaggcagcatgatgtcatgggaagagcaccgaaatgggagtcttgtctcacctttctcaggggataagggctaggtgagtaagccaatgagacttttaagcccaaacatcttcacagtattgtgttgcttacaaaaagaaagtggacaacaatatgaattatacacttctattaggttggtgcacaagtaatttcaccattacttttaatggcaaagactgcaattacttttgcaccaggctaatataaatcacagagtttgcttatgtggagaaatacttactgtcactaggagtcctagaacaataatttaacttcagttcatcttaatatgttgcttctgagaagagttgccagcctctgctacaccccagaaaaactaaaaaataagattgtgttaaaaatacgcttatcacctcatggttataatgtgatccagattggatttgaagtaattagagaataataggatggaatcaaattggtttctaaaatacatagcactagatcttctcaaattaagattctctggagtatttgaatcctatgagcattttttttcaatttttcattttcattttgatgctatctggacacaaactacctcaagcttagaaataatgactttctttcacagtgaaaattatcaatggcaaaacatttttatagaataagcatttgggttgttaagttcttggggatgttctgtgaagtgctaaagggatttaaattttcttctataaaaagagtccatgcaattccatctttgagaaacatttaatgtatcagatggcttttgctgtgtaacaaaccactctgaaacttactggctaaaccacaatcgtcattattacattttacaattttgtgggttggcaatttgggctgagatctgctcagtgtttttctggtcttggctggactcattcacatgtgtctgtggccagctactaggcctactaggaggctgtcataggatgagctcagcagggatggctctgcattgtctcacatcttccagcattctcatgaagtggcaggtctcctagagagtgagtggaagcatgcaaggcctcctgagatctaggcttagaatgggcatcctgtcacttctctcaattccrctgatgaaagcaaatcataagttcaattcatatctaaggtggcagaacagaaccctccttcctttccctttctcccataatgttgcaaggaaatgaagataaagaggagatcattgcagccatttttgcagttgcaaacaatcagcaaaatgtatatgaaccagtgattttctaagtgtgcttaggaaaagccccttagggctgcgtggtgaagtgtgatgggtagggtgggtagacagtcaagggaggatttatgggcagtgacttggactctgtctcttttgcgtttaactaagcacctctggttccatctacttttgtttattttaaactattttgatttgaacaaaggtttccatacctaaaatgtcaaaaatcaagagtataacaaccgatgcaataggaagatggaaaggtgagagctccttgcyagcagaagttgtgtttgggggaggggttgggggagcaagttgtgcagggagcattctggaagagtgtgacttgaacacaaatgagaaagaggattctctttgcgagtcagatccctgtgggtttctttctacatcccttactctgcctgacattagtgccttaaatataccaggtcctttataaagtgtttgataaaacagtgaatagagggatgaatgagcaacagtatacagggatcttaccatattttcctggagattaactccagtggagttaaacccacaattacttgcccgaagaagcactaaggaaatagctaaaatgaatggtctcacagatgtatagaaagctgaaaagagggaaacataaacagggacataacatagtgagtctgtctactgtatttatttatctaatctgtttgatcagaattattttgtgtaatatacacctagtaaaactgcagctattgaaagaaaaaagggaggattgaaacacctagcaatagatggaacattgttgttcacagacacacgaaacacaaatctgggctctgttttttaactcaggattcacatttttaagtacctttattagtttacttttaggccagggttggcattggaaattacctaaacacacttgatttgactgactttgaaaatgtgtattgaacccaagctagatagtatttttttttggttctggtttcaaatggggaaatatgcttaattatagcttgcatcatggcttggaaattatagcatttatatgttgatgtaacttgcctgaatgcaaaaagagggctatgtataggaaaagggacatatgtaaatagatccaaagcatgtttggcaaggcagaaaagctaaaagggaaagaggaaaatcgccttacctgccaaacatttagggaccacatgccaagtgttaccttcacttccttccaatctgtagccctgtttagtcttcagcctcatacataaaaccctctaaaattttagggtagaagtgggataacctctgagtgatttcagcacaattatttctggaaaaggtggacttgagtgtatggcagcttcctcagcatacattttaaataggaattgtacttaatttagatttttacattttgggatgaatgtgggtgatttctacagattttgacctctagctcaccttgtaaattgttttaattctcaaatgcagattcacatcaaagtagccaattgtattagttagctactgccatatgacattataaaatgaacaatcccaaactcagtgatttaaatcattgaaataaatgatttccatgaaagtttgtattgaccagtgtctactgatctaggcttggtactagctaggtggctggtatccaattgtcagctccagctgggcttggctgtgctagctctgcttcctgaatatttatcctggggccaaagatgaggggkaaacaatacctggtggatggtcttctcatggcaaatgacaaggtgcaaaaaagtaagtgggaatacatgaggttgcttaaggcctatgctcagaaatggcattctaccagctctgctcacatgttatcagccaaagtttccaaggctaaggtgcaggcaagtgcactttgatgccaacctatgtccatcatcaccaactgccaatcaagaccaagatctttatgttgcaagtggtcatattccttaaaaacaagaaaaatgttttcacagagtgttctttaatatatggttggatgcaaaatattttggatgagaaaataagagactaagttgttttattattagttgtgtttgcattttacacactgcttgcactattatctgagtatgaattttaacaattgacttgcaatgagtaatgttcagaataatttatgtcaataaaatacttaatttacttttatacattttataatctcagcactttgggaggctgaggcaggcagatcacttgaggtcaggagttcgagaccagtctggccaacatgatgaaaccccgtctctactaaaaatacaaaaattagctaggcatggtggtgggcacctgtaatcctagctacttgggagactgaggcaggagaatcacttgaactctggagatggaggttgcagtgagccgagatcacaaaactgcactccagcctgggggacagagcaagaccctctctcaaaaaaaaacaaaaaagttatgaaagatcaagtgttttatgtttataattttttgatgacaatctttgaatataagaaacagaaaaaaagacaaccttgcactttaaaagaaaaataagctgctcatttccaaatttagttggtgttttagttactagcatttgtacctctcttctttgagaaggaaataattttaccatttaccccaaacctacttggcttctttcactctaagccctagctggatgtgtcagtggtttttggaggtggagttgaataacaattcagtgttaatagagtcacattattgaacttttctttccccagattgatgttctgccagaaattgtggaggctgtggaagggaaggtggaagtcttcctggacgggggtgtgcggaaaggcactgatgttctgaaagctctggctcttggcgccaaggctgtgtttgtggggagaccaatcgtttggggcttagctttccaggtaactggacaaagaaatgaatatataaaatagacaacttgacagtaaaacaaatgaataaaacaagtcagactgatttagttctgaatcastctgtatcttttcacttggttagggggagaaaggtgttcaagatgtcctcgagatactaaaggaagaattccggttggccatggctctgagtggtaagactcattcttgtttacaactttcttttcttttatgatctttaagtcaaggtccttggtggagagaagtgaatttgaaagggaagagtgtgggatcatttgagtacattaaatttgacgttgactccatatttacagctttgaggaactctgcatgtgcagtctctagtaattacttaacctctgtttttcacagctttattaggaatattttggtgagtacgagtacttggaggtggttgtaacatcatattcttcctcatctcataacacatgaacacatacatctacctggatagtcaacagctccctttggacatctaagtggcatcccaaactcttacctgtccaaaactaagctgctaactttccacgttaaacctgctccacctgcagtttctccatcagttcatgttaatcccatagtttcagttgctcagtacaaaaatcttcagtcattcttgactcttcttttctctcacaccttcttactcataggggctcgatcttcaaaatataatcagaatctgacctccctgtcatctccactgccaccgccctggctggagccatcattgtctctcatcccatggacattgtgggtgggcacgtctattctcacctatctcccctctcccagtctgttctgatcatggcggccagaacggttcttttaaacattcattgagatcatgttacttttctgatcagaaaacccccagtggcttttggtttactcagagtaaatgccagagtctttatagtggtttacaaggcctcatatggtttgactcccgtcatctttctgatcccaacttctaccaatgtcacccttacttattctgcccatgtgacattttgcctccatgatgtcccttgactatgtgagatatgtttcagccttggggtatttgcaatggttgttcgctctgcctggatgctcttcctccagacagctacatgaaaaacttctcatctttcatgtgttcacataaattgtactttcttaaaggtgcctatcctgattactgtgtttaaaatagcagtttatcctccacccatctattcgactccagttttcttttccagttttctttcatcctttttccatagtacctattgtctcctatatatcagctatcatagaatttccttttaaaattatatgcattatatattgtctgtttcccctttagaacataagatacatgaggcagggggctttgttgtcttgattgcagtattttcagtgtctacagcagtgcctggcacacaaacaatacatatttgctgaaagaataaataaataaatacacattaaaatactactagtgactatttctaatttgactcagaaagaacctgtagctagaaagaatggctgtgagttgattatcagctaccgcatttttgaaggtaaagagggcttccttttctgtaatccatatcatctggattgttcccatagataaaactccccagataaatggtctactcactactgtactcagtctgcagacagagcctcaacaagaagaatgccattctgtgaatcctcactatgcattttaatttgctacagacatatcctaaaagagagctttcagtcactgactctctattaaatgtggcagaaagaatatactctttgtgttaataaaaatatgtgccagtcattttgtgttaaggactgtttaggtaataaaaaatggtctcatgccacataagatttggcaagcctaccttgaatcataaaccttacatttgtcaaattttacattccttgggaaaacgattacctgcctgattattattgcattcagttcatattaaatgtatgcattattttttcagggtgccagaatgtgaaagtcatcgacragacattggtgaggaaaaatcctttggccgtttccaagatctgacagtgcacaatattttcccatctgtattattttttttcagcatgtattacttgacaaagagacactgtgcagagggtgaccacagtctgtaattccccacttcaatacaaagggtgtcgttcttttccaacaaaatagcaatcccttttatttcattgcttttgacttttcaatgggtgtcctaggaaccttttagaaagaaatggactttcatcctggaaatatattaactgttaaaaakaaaacattgaaaatgtgtttagacaacgtcatcccctggcaggctaaagtgctgtatcctttagtaaaattggaggtagcaaacactaaggtgaaaagataatgatctcattgtttattaacctgtattctgtttacatgtctttaaaacagtggttcttaaattgtaagctcaggttcaaagtgttggtaatgcctgattcacaactttgagaaggtagcactggagagaattggaatgggtggcggtaattggtgatacttctttgaatgtagatttccaatcacatctttagtgtctgaatatatccaaatgttttaggatgtatgttacttcttagagagaaataaagcatttttgggaagaatatatctagtccttttgtaacaatatgaaattttaattttattttctgaaccttaattacctcctcgtttcctttctgcataccttatyggttatcctatacctcctacttctctttctttactcttttgattctttaccattgataaccatgtgcaagggtagctacataatgtgtgaggactatgccaaattaaaatatgggccccttgttcaaaaagcaagacaaaacccttttccttccttccacagtttttctcttaagctgtcatggagacttgctgtttcatgtcatgcttccttgggcatggggatacccacatggcaagcgtagagccttccaggtgcctggggtattgccttacaacttgccttgatcttacctgtgcccatgcccagaaccctgctgggggtgcagggcaaaaatactaagcagaatgcctgagccagcaaccaagaactcacttagcagacatggggaggtggcaggagatggaacaatgtatgatgctaggctctcagtgtccccggcacaagttccattgttgcatcgtgcatcacttataaaacaaattcaatgataacattattaagtatttcaagccaataaccacagagcatcaaaccctaagcccaagtcccctttctgagcatggagccctgtccactgcatgaggagcatgcccatgaagccctgatcacgtgacttttatattcattcccaaaccaagcattttacaaattggaggtgaactaggtagccaaagtaattttgaagttgatttttcgtcatctctctggttgttcaaccactgtgaggtacttaatgaaacaattcagagaatcactacctgaaaatatgattattatattatgttttattattattatgctttattattcccagaactctttctctctccctttctccttctaaatgctaggagattcctaaatattagcatgaacacacaaaaaacttttttctgaaattatataccagtctggtaaaaaataatcacttaactttatgaaaaagaaaagttatcccttaactttttctcaaaatacgcagagtaaatatttctatcatatcatataattgttttatgcttttccaattaatattgatcaatgaataagtatatagtaagcacctctaattccctcaacagattcaaaatgccttctctgttggcacagaatttccattttgactacatcacagtgtgtggttgtgtgggcgcttgcttaaaagttgataacttcccagaaaatagagatctccaagtggtgttttatgtaaggtttatgcaagtaacagtgagaatggggattactggtcttaattcgtgagtttctcataatttttaagattccctgagccacaataactccttgaatgtagattttcatttattttttcagagttggaatatatctgaatgctttttgtttgataattttttcataatcaaagatatacagctgtttgcttttacttttttttaatgagtgatatggacccaattgtaacagtactgaaatcaaaagtgtgtaatggttaaaagaggaatggtgtgtgttagttgtacaatcccttccaagagttttgaaacttaggcttgatagacagatttctttgaggaagccaacaaacgcctctcttcctaagtttcttgaaatatgttggcgggaggggtaacagggcttcattacggccgcctctgccttttgtgtatgttattttgtggatatagtgctctagagcagtttctcaagctttgatagtgcatcagaatcaatggcagggctcgctgaaacagattgctgggccccacaccatggattctgttgcagccatctatgtgagccagctattgggtgtgggctccaggcagagaggccaagcctcaccttaaaaggccagctgttccttagccaattgataccttttccattgaattgtatttcttattgacatatgaaattcatacagcgaggtgtgtaaggtgctgaaacctgagtgtatcggtggctacactttacatttacacctatatgcctacctcccagataaaaatacagaacattttcatcatctccaaacatactccttctaccagagataaacctatgccgatttccattgccattgattggttttcactggccttacacttcacataagtgggaccatacagtgtgcacttttgtgtttagtttcttttgcttaacatatgtgaagtccattcatgtttttgagtgtatcagaagttagttctgattattgctctgtagtaatccattgtaggaatgtaccacaatttatctatctcttatcctattgggtttttttccagttttctgctggaagttgattctaaatgatttttgcaaaaatgcaaattcagtgttattttataatttttcaagaaatgcaagacattcagatttttatgtaaaaaattttaaatattggacgatatttaacattttgaacactgagcaggtcatgttaaacatggatgtggcccacaagccacaagtctgaaccctaaaacattttatcctcacagatgttttcctcayggctgaaatcactcttatgccctgatacagaataatgcctgagacctgtagcagtgatgggtgcctgccaacagaaattgccagaatctcctttgtttaagcttatttatattcagctacctgraagaatgtgggtgtgaaacaaaccttcttctctttacgaggcttggggagcccaggttcccaggcctgtaggaatgaattgaatagtattgatgcctcttagcgtgatgtttgcagactgcatttgggtcattgctgtgttattcatttgcttgtttatcttgccaaaacattggcgtttgtgaaacagctttagagggctgtggtggattaggaaagcatgaaaggaagttgtggcttgttctcaaacagagagaaaagacttttctcttcattgtaaaattcataacttatttactgtctgatggactatgttccatgtcagttgcatagcaacaaaataaagtttgtccgtttaggaaagtccgaagatttcttttaacataaagacaggatgctttccgaacttatatttgcctcagcgtgcattctgtcacatgccaattatagaacaacatcaggatgacagtttattttaggtaatgtaaatgttagctcaaatgataggaggctattattatatgtttatgtgatgggaaatctcatctattctaaaagatgcaatttcctgttcttacccaaatcaaacttgagcaataggtgtcttctttcctccctaatgtacttgcccattgttggaggaaagaaaaagatacttttttatttttaaatccagttatctgtttgcttttccactgacatttttctgatcttagataatgagtataagttctattgaaagttttccaggaccttctaaaaattaagaattgtgttaccctgaatgatgccaaaagaagagctggaattcaagtgagtgataggcttgattttgtttgttcctttgattcagcatcacaggggaaaagaaccttgcttggtttcctatgtatcttttctggttagatcatctgtctttaacgctgatttattttccattacagtcaacatcctgagtctgtttctaacagtggaatcttcatattgatagagtctttcatggtaagattctttacatggtrtgttcgagctttcttactaaacttaatgaagatcaagactaacctgctcaaaagcactgagttagaatcctgaagatctgaatgattagctgggtgaactgttatgtaatctgaggaccctcagatgctcagctgagaaatgagggcggcagcatctgtctacctctctgggtcattatgaacacagcatggtgaaataggtgagaatttatcatgaactgtaaatcaacagtcaaaggaaaatattattttatattaatagtttaataatgattattatcaggaaagagaataaaagacattctaataagtattttattttatagtatttatttagagaaaagttgaatattttacagagtaaaataaacatcaccacagattttaccacagagagataaatgttatttatattgggtgaatatcatctcagactttgctgtgtttgaataatcagtagcaactggatagatagaagtggttttgaagccacctttgcaaaaattataacaatgagaaaattatgacagtgaaaaagacctgatctaatcaacttccatcttacctttgacctctgaactctccatggtcattcctgggcttgggccaagctaacattgggagatatttagtttatagtttaaataataacagcccttcttaaaaactaaacagcccttgtaaagctaaggaggatgagaggagcctaaattctgttaagatgtaggcctaaaggatgatcagcctttattccaggggtcacaaaatttggaacttccccaattactcctgcagataacatcaccattgtgtaccctaagattggccttttgagatgtcttttcagtctttggcatttctgaggactgggcggccccacactgatccatgactcttgacgcagctggtcctgtggcccccacccagaagcagactcagtgcgcaaggaccattttccaaactcctatgattacatccttagccagtcagcattacccattccctagccagccaaactacctttgaaaaatcctcacctttggattttcaaggaagttgatttgagtaataataaagctctggtctcctgtttagatggctctacatgtattaaactctttctgtattgccaatttgtggcttgaaaatttggctctatctgtgcagtgggcaaaatgaacctgttggatggttacagctttactaaaataggactatacaatacatgttatatttgagtaagagattcaatttatttttacttgaatttgtagaaggaaaagtaaagttggaaacatttaaaattaaggtaattttttttcaaaaagatatatcgtagattaaaagtgcctacacaatgtatttggaaaattatgaaaacttaaaagattaaagtaatttttgatttatggcatacactttctttaattttagcaccagttaactcattgctataaaaaatgaagtagtctcttacatctactctccttttttcctcttctcttcccctttagtgtgtgtacatatatatatatatggatataaaaggatatatgtatatatcctttttttgagatgaagtctcactctgtcatccaggctggagtacagtggtgtgatcttggctcactgtaacttctgcctcctgagttcatgtgattctcctgcctcagcctcctgagtagctgggattgcactcatgtgccaccacatctggctaatttttgtatttttagtagagatggggttttaccatgttggccaggctggtcttgaactcctaacttcaggtgatccccccccacctcggcctcctaaagtgctgagattacaggcataagccactgcacccgctttttagggccaggcgcagtggctcacgcctgtaatcctagcactttgggaggctgaggcgggtggatcacgaggtcagaagatcgagatcatcctgactaacacagtgaaactccgtctctactaaaaatacaaaaaattaactgggcgttgtggcaggcgcctgtagtcctagctactgcggaggctgaggcaggagaatggcatgaacccgggaggcggagcttgcagtgagcagagatcacaccactgcactccagcctgggtgacagagccagactccatctcaaaaaaaaaaaaaaaaatatatatatatatatatatgtatgtatatatataatttttaaattatcaaagtataaatcattgtcttctctatcattgatttccaaaattgtttaatactggttttcatttaaatgggctcggtacttataattgtcatagcttctccattctctggttcttacctttgattcacctcctggttccctagatttcactggccaactgtaatttcaaaaatagctggtattctttaagtttgtgcatgtttaaaaatctacttgatgttcttgtatttgaatgacaccatggataggtatactactttggggtcacattttctgtttgtagacattttggattgctttctggcattgaattttatgtgaagaaataaaaactggcttactcttttgctcgtgatgttttaacataatctccccacatccactttccaaacccaatgtctaaaaaattatttctttgtctttgaatttcaatgacttaagctaagttaaagctaaatgtcacatggcttacaattgtgaagcacagctatgcctaacccactgtattttattttaaatttgaatatacaaaaaacaaccagcataagtctcatatcaattattaacatatattcttacaacattgttctctacttttctatgtgatccttaccaaacacattataatgacattaatagcaatggttattatattataaattattgaacattttttctttgacaacaaacttccttagaggtttttgttatccagaccagtgctatctggtgaatgtgctgtgatgatgaaaatgttacccgcacttccaatatagtagccatcagccacatgtggctattgggtgcttgaaatgtgtctrgtttcaatgcttcattttatttaattttaattaatttaaatttaagtagtcatatgtgcctagtgggtgtgtattgaatagcacagatctagatgttatgaataaaattgagcaytggggaaacgtaatctaatagactcaagactagtttaagttgaccaacmctgctatgtgattatcctggcgaagtcatataaagtctttttgatgtagctttccagtttaaaaaaatacaattttatagtagctcttacccttatggtagacagataaactgcaatgataaatgtaatacaatttataagttattctatatagcatgtaaattaattgcaataacaaatataataaaattttaaaattatttgggtaatgctatattgatctaaagctgctttatggaattatttttggtttgtttttcttattaatctttccattcagtttactgttacctttttggtaaggataacctagaaaagcacaataattttgtctaaagtttagagttcatggcacagcccagctgttgagtggacaaacttgagaaatctcaagtcaaacttgacaaatcttgagaaaataatcttgaatgttagatttcatcctttaggtggaatagtaatatagctaatcagtaagacgtaatgacaagtagtgatgctttcaaacagtaaaaataatgcacgtgtaagctattatgaaaagaatagtaataaaaatatttggcatgtaatgtaatgacttatatcttggaaatctggaaagaatgaacaaaacttttagatataatgaaatatttccagcagagtgaatgaaaccctgtatcctaaacagcaaaatggcaccaataagaagtctttctcaagaaatgtgggcatctccttgacataagaacacaggcttctttatcatatgaacaaatagcattgcccaagccaataacatattttggctctgatttttctttatttttaatactatgttatttagttttattattaatgtgcaaaccactcagtttttaaaaaatattctgaataatagtagacaatagctatcccatatacaaaaatatagttttggtttgaattttgttttattttttaatctcctcaagcatttatccttgttgttaaaaacaatccaatgaccctcttttagttattttaaaatgtgcaattaagttattattgactatagtcatccttttatgctatcaaatactaggtcttattcattttttctactcttttgggatccattaaacattcccacctccccttgaatcccctactacccctcccagcctctgtgttacacaaaattctactctctatgtccatgagttcaattgttttcatttttacatcccacaaatacatgagaacatgtaatgctcatctttctgtgcctggctattaaacttaacataatgatcctccggtcctatccatgctgttgcaaatgacaggatctcattgtttttacagttgcatagtactccattgtatatatgtaccacattttctttatccattcatctgctgatggacactttggttgcttccaaatcttggctattgtgaacagtgcggcaacaaacctgggagtgcagctgtcttttcgatgtgctggtttccttttttttgggtatatacctgtattagtccattttcacgctgctgataaagacatacctgagacttcgcaatttacaaaagagagaggtttaattggacttatagttccatgtggctggggaagcctcacactcatggcagaaggcaaggaggagcaagtcacatcttacgtggatggcactggcaaagagggagattgggcagggaaactcccccttataataccatcagatgtcatgagacttacttgctatcatgagaacagcatgggaaagacccacccccatgattcaattaccccccactgggtccctcccacaacatgtgggaattcaagatgagatttgggtggggacatggtcaaaccatatcaatacctaacagaggggttggtttgaattttggtttaaatattatttgatactataaccatactatctagttgaagtactaaagagcaatatttctcaagtctttttttaagaatttctgaataatagtaattttatataatatgtgtcatagtgtgaacatccctgttttaagtagtaatattttggttttaatacaccacaaaagtagtcaggaagaaaatctttttaaaaattcttcaattatttgacttaataaagctaacattcactgtttccaagattcccagccacatatatgacaaaataaataaataaatagaaaagcaccacaaacaacaaactgcacaaaaccacaaaaaatattggaagactcagaaattagtaaaatgctaatctaccaaaaatttagtttatgcagttattataaattcatcattatgggcagggcagtgtataagaaagccagaatccacaacttgaaaaggtaatcactgaygcaactgttttgtctacataactgcataaacagtttgcctactttccactgagttaacccaatactttgttgtcatgtaaacacaatctaaatgaaatccacagattttcccccgaaatcttattttagctaaatttttcttggctattcttattccaggtctgttaacaatttatccagaattatttgattggctttgaactcttttgccatctcttgtccatcctttattgggcaggcaaatgatggagaaaatgatgcaagtgcaagcaactaaacatataaagaaggtctgtggaaagcagagcactccccacagttttgggcctttctctggaggggagtggttaaaaggacatgggaggttaatgtcgaaactgcctccccattagagagacgtcctttttccagaagttcaggaatgagaatctctccctcctctactaaacatcctctttgttaacactcctgcttccaaagttcttcaaggcttcaggttaataaaataacaacatttattttaaatgttaattaaaattatatatgatgaatcaattacaactattcagtctctagttgttttcacaaatatttacattcctattgcttattcaaaccttcctgatgatggaggtttacatgatcctctaatgtcttttaccttgcccagtagaggggaaatgagagatgatacagctgcaacaaaaataacaacaaaataagactcacatcctgcaagaatctaactctcctatcaattataatttattttatgtactcctgaccattctgtctttttgactcttgttcaggaataaagcataaatcaggtattcttagtagtctattcattataaaagccaacattattttccagtctagattcatttgaaactcagaaatattggcccctatcagaaaatgttcataatcagaatttgtctgcactattaaagcatttactaaaatcagtaattatgcatgtcctctgctatcacatgataggatttcaattattaaagcaatatactatttttaaaaatttgtaggcagtttcatatagagagtgagaggaaagtttgcagggatggaagtttttggacacaacctataattttctagaggttgtccagatgccattagatatttctctgagcactgaggtcattccctgatgagtattggggtaagagctgccatccargtctttggactcctgacaaagagctctttctgtcagggcacattgctttctgctctgcactttggtaacagaaatacagtgcctggaacaatagaaagaccacccttcagtggcggtctgtctactcatgtggcattgcctccagttctggccacactgaacgctttcaggggtgagaaagcatgtgggaaagacgcctggaaatcaagtcatgcttatagaatccatcatagtcttggggttgacatgtgatgatctttacttccttacatgctgttaagtagacgtatgggtaaacttaatgtcgtcctaagcacagaagaagcatcaatatggaaaaatgatgaggaaatagtgctagaactagactgtcattttcatgaaaggaggaaatgtatcttttttgctatcttaccaataccttgcataaaaactataggtattcagtaaatatttgttaaattaactaataaacatgttaactaatgtcatggatattactgactttttaaaaawctctaacattctatgcttagaatcaaatatagcaaagacttaaaagtakgccactgagaaaatgtaaaatcacaacatttaatggaaaattttaagaacattgattttataagaatttttcatgatcataaactgctattgtaaaaatatgcttaattttcataacagaaataaacagagaatattataatatgaaagtatgattttctcaaatatagattgcagcatttaaatacttatttgattctattctcatagcaaataactatcaaattgagattaataaataattgaaataycacaaagtcatagaattttaacattacttaaaatatgtcagattatgtggctagaagttactcatgtgtagtctgtgaagcagtcttacaatccagtctttgaaaaaagaattctgtgggcacctcacagttgtggtgtgcccaatactcagtactgggcacatcagttggatgaagatacatgctgcatctcaattgtgcaagagttagttcctaaaaagtggtaagtaattaatactcctttagtctttgtgagaaagttaatttttatctaagcatcctaaacaatgttcaactaaaatttcataactcatgatcttttgttggaaagaacaaaatgcaacttgaaccaggtgaaggaaaaggaggagtgtttagtatctcaatcacaggaagtgttgaaataccaagccacaggaaaagcgtggatgcgattgggcccagggaaacttgggaccatgggtttgaaagcaacaaggactacttttgcttttctccaggtttgttccctcagaatgtagcctttatactttttcactctaggttggcatcctcctcctagtgaggcacatggccatctgcagctccccagattcctatctcttggttctgccacgaggaattattcactctcttgttccagctccagttcaatattatctgagagcagagcgctaattgagtctcttgcccatctcttgcccaatcaaacttggtcaggaagaaagggcactatatgaattgggggctactttgagttctaaatgttgtagtgtggagaagagggaagagaaggggtacctttttccccagagtaggaaagctttattggaaacaaaacaataggcgtttcccacagaaacaacaaataatttttagtataaaatattttggacattggcaagattttggacatacttgttctaaaagagtacctctttttggccaggtgtggtggctcatgcctataatcccagcactatgggaggccaggcaggtgggtcatgaggtcaggagatcgagacaatcctggccaacatggtgaaaccccgtctctactaaaaatacaaaaattagccaggcatggtggcgtgtgcctgtagtctcagctactcaggagactgaggcaggagaattgctcaaacctgggaggcggaggttgcagtgagctgagatcacactactgcactccagcctgggcaacagagtgagactctgaaaaaaaaaatcacctatttttctagaattcatgtgtacttggcaccctgtatattctttgaccttagtcttataatamctaatggatacagcatcacgttgcaactgggaagttacatgctttggaagaaatggtctggagacccactatgagtagtgtcttattttgtttgcttaaccacctatcagtgatccagaaccgtaatgtcagtttaagaccaagaatgtttgatgggagtttaacatgttattccaaagttaatgtgtttattcttggaaatgtaacttcttggttactttattattgatgtgcataaattaatcatgtaaacttaaagttgagtcttgtggtttgaaaagacactctgcccattagcgtgtcttaagtcttatggtaagaaaatctcatttgttaaaccagggatttcccattagtcctttgtgaatgtgtacaattaatatgggaaataaccagagttctgtggaatgctgtgtgagaaatgttaaaaatccagccccttcatctgtagtttagggaactgaccagaaagattatgacttactcaaggccagtcaactaatggtcacagagctggagataattaatacagttttaataayaaaattcatcaaggtttaatggtaagaaaagtaaaagtgtgtttatgcaaattcctgttagaattatcttaatcagtttaaatagactgtagactttagtcaattattacttctaaaaattatcamctttgaagtggtacaattttgttttccacattacaatgcagaaggaactatatgagacaaaaaaggtacagttggacacttcaagatcaacagacagtaaaaggaattcaccacagaggagttggaaatcctcaggcatgatggaaccctcaaatccaaacccaatgtgttaaagtggctgttctacaaaggtgcccttctctaacaggtgtaaacactgaccccatggaagtggtctgagacccttttgtaccwtgctaatcatcttgattctaagcatacttcagtatagagagccaatactgttccttgaatccactgagtagtctctcygcagcaatggaaatgaacaatctacttttattgagttagtgtcagctctacatataggcagaacacacagttgtctatgtgatatgctatgtgatatgcttttgaaaccaytaaaatcattgaggagaagacagaaggaagataayatttyccagacaatctcaggaagatgcaggctaagtgaagcatattgatgataacttggtatagctgtgatcaacagccaaataaggtgttaataaatctcctcatagaaaagcaacatattatctagatagcaaaagtggcaactgaagataagagtagagagaatcagctagaagaatccatgtgtaggatggtcatatgttacagtgtgttcataacaatcttggttttatactcattctcccagtgtaattaataatgccctgtttactgtcaaaaatctctcaatttagkttataaattacataggccacattgatgagctacacttgtgatatgcatcaagtgatctgattctgggtatccaatgttctcttgtcttgttgaaaattctagctgtgtatttgaacaggggaggtattcatgggggaaaatgcagcatttccagagaaggcagagggatgaaaaaaatatataactcaaatagtggtctttawcatgtaaatatccctttcaagacaaagaaaaattgccaaatgagagattttgtttacttctgtccaagctcaaaacatagaatctcttgtaaacaagattttacaggccacttttgaacctggtgactttcttctctgttaacataagtgtaatgagtatcaaactggaatgctttttgacattgtgatctgatgtgatttgcaaaatgagtttcatagagaaggatggacaactaattctgctctctgctacttctagctcaaaattctcagtcctgggcaaggaatagagggagaggaaatattttcctgcctatgctaactcagctggcctcctaaatgtctctggacatgcatgacaatccgtcactcctgtatgctgtccagtttttcctgcagaaggtcattgcctttgacactgtcccatagctcttcatcaggccttattctggtgagggctggagccaaggagaacacagttgagcactggcctctggcttccattctgggcctggcaaggctacttcagaatggagaaacagacagcaaccaagccacgagcatttgttccagtcagctctcttgccagtctgggaactggtccttatttgaacacctgagacccttttcttcatctctttggtttggtggtttagaaaattatttccactgtcaggtataggtaatatggctaaccccataaaaaatacagaacaatgattataagagatcctgatctgtaataatgaatgaaaattcaaaaatagagaatattcccgacaatatttcaccaagtaggaccttgtagttagtgacacttcttacaaataatcttccaaccctaaaattacccaataaacccatcatgtaggtaacatttctacagagacaaggagagaccaaatattgagctttgaataaaacatactgatgaggaaagtcaaaaggagaatattggacattgatacatacattctttatctataaaaacatgtctcactctttacattcactaatcattggggattgattgattagctgttgtgctgttgacgtttttgctgttccattttttatttcaaaatcatacatttttaaaatattatttaaaagtcattttctattagaatcacaaacctttttcttgtatcaaaagttgtgccacaatcctggttacttttggattcaccaaacagtcyagcagtcatctgtagaaatgaatgcttgagagggggctgtagtactatttgaatcaatttgttccacaattgcattatcactgttactcatcacttgttgcctcttggcacaatgcaattttcagaastgttgttgacaaagtctttaccaccactttcaaagatgcctcctgtttctgaaggtgactcttcagacctctgtgttacggggaccagatccaggaagctcaaagacatatggttatgctgagcccagaacaggttttgtttgttcctagacactgatggctatttgctgtttgttaccctacggtctcttccattcacaattcaccttctactaaagttttatttgagtgacagaccctggaagatgaaaagattccagattttaaagcattaatttgtgaggaatctggacgacagaaagaccagctccatcccagaccttatggcaggcacaattttcattctttttatatctcatcattgaggacctatttgaaatcttattcaaaactgttttccagcatctctctctaacacctgtccagatgctaacaaagcagtagaaccaggtcaaatcgatggtttttttctctgcccttcacacaataaatgcctcaggtatctgtctagtgtttgatattaaaaatccctgaccccatcatatccattgatatatactaccaatattttgagctgctagcatatttgcctgttacgtcaaggcatctgaaagtttaaagcttggcaaagcaatgtttttctttttcttcttctataatcctagggtaaacattaagcagacagcatttctgctttgagcattaaaggaaaaaaaaagactgaatttgaaaagccttctagtacactttggggatttcggaaagtgtcgtttggctgggagctgagtggagaagctgccattctgtagatgggataggaggaaagccgcatggcctcattcataacttcacagctactgcaaatatcagctgatgaatatttatgttttccctggcttaggcccgaaaggcaaacaagggaaaaaaaaacgaaagttaggaaaaggtcgtctgaactctgtgggattttttaccagcactttccatgcgcgagccgtagccctgaatgaagtcattctgtacaggggcccggcacaggaaaacacagtctgttcattagctccccgcactttgtttgaaccttgtacattcatggggtcctgaaagggaaactcctttttaaaaaaatcaaacacacaggatatagagctaccttattattattttggtaaattattgcaaattgctcctcatcatatagtgacctcagtggttcattgaaagagcaagtcagtgaaggagagtttaaaaaaaattatatattttttaaagagggccattccagttcaggttaatattttacagagttacagtttctaaacatattttaaagtctatataaataatatcaatacattactacatatcgtagtagagcaaattattttttaaaaatgtactctagattttagtcttatttcaggaaaaatagcctttaagccccactgtagaagaaataatcacgtcttgatcacttgggtttattatttaaattctgttttcctccttttactttttcttggcccatcagtactgctttcaccctctgctgccatcactgccacagctaggttgacctgaggctatggaaacaacacaaaaacaattaacaagatgagggatttttctacttgccaatatttccattatcagttttgtttcaggagagraggctcaaaaatttggctgaagtgaaatttgtgactgccttatggatttcagtggtagatacatcatgcaattttctaacattcatagagaggcaggtgtcctcagtggggatccccagaaatgttcccctgtgatgagaatgggtgcctaagactcatgaaggaagtacttccagcagacatggggaggtgagagggaggaaaccagacacagaatggaagatgacaagcaaaggaaatgcccagcctcagctgggtcctgcaaggagctctgcggtatagttttacccaaaagttcgttcccatttgagggtaagggctgtccatttttggagtttggtgtggggggtgcactgggtgaccagctgtcctggtttgcctggcaccatcctgctttcrcactaaattatcttgagaaatcttttagtcttaagcaaactggaattgttggtcatccttgaagcctgtaaattcccaggtacttctgactccctgggcagcaaagtggctccagttgcccaagatcagtcttctgaatggagtcacaggtgcaagccatgtgaaacaaagtccactaaagmttgtggatgggcatacagacatgacaagagcctctgaatggagctcagccatcttccctgtagcaggtactatcctctacccagttttctaagaaacaacatrgggtcgatggagactattgtagatgtgggattgagggcaggagttgcagatgaggaatgcatttcattctgtacgtcaagttcttagtcctagtgggacttaaggactatgatatgtaggttcaggactagtcaagatttccaagcagatttatagagggcattagcactgaattaagttggctacgaatctgtaagtgtgaaattcacagagtggacttgaacaaaatctctgtagttatcaagtgggtaggaggtaatgaagcaattgcccatcagtgagtctctctcaacatgctgcttctctggccactatgaggttcagttytggaagtgcatgacatatatgtaatgaaaattgaggacatggcgaatgtagcttcaaagaggatataatgaaaatgagagtgaacattccctagccctgcccaagacaggtggaatcccayatttcttttgatttaacttctaagagttaacaataactacccaaaataaatagcgaatattagtcaaaatttacctttttcttgtcctctgttcttgccttctaaacataagggtgagatttttttttgttgtgtttctctcttggcttataaatataaaatacagtgagtgagaagttggtccattgactagcttgggcagacatacttggtaatagttgcatgtatttaactttgtgtgttggcagtgataacaacctcaagtttcatgcttgcttcttgcattgttttgcccagtttttcaagttccttatggagcagctcacgtagaggatttattgtaggagtgctttcttctgcccaaagcaatacattatccacatgaaaggatatctcacacagccccatgctgcattactgcagaggagaaacgagacctgaagaaattgtttctagctaaatagctgtagaagaattgcccaaacagtaaacatagtacccagtaggtagtatttcaattcttttctcccctttttccctcctcccttttggaatctcccgtgtttattgttctcatctttgtatctctgtgtgcacaatatttagcacccacttaaaagtgagaacttgcagtatttggttttctgtttctgtgttaattcacttaggataacggcctccagctgcatccatgttggtgcaaaggacatgattttgttcttttttatggctgtgtagtattccatggcgtatatgtaccacacattttctttgtccaatccaccactgatgggcatctcgggtgattccatgtctttgctatggtgaatagagatgtgatgaacatacaagtgtaggtgyctttttggtagaagaatttattttcttttgagtgtgtacccagtaatgagattgctaggtcaagtagcaattctatttttcattctttcagaaatctccaagctgctttccacagtggataaactaatttgcatttccaccaaagtatataagcattctcttttctctgcaaccttgccaacatctgttattttttgactttttgataatagccattctgattgttttgaggtggtatcccatagtggttttgattttcatccttccgatgattagtgatggtgaacatttttttcatgtttcttgaccacttgcatgtcttcttttgagaagtgtctattcgtggcattaactcactttttaatgggattcttttttcttgttgatgtgccttttccccattgtttatttttgtcgaatttgttgaagaccagatcattgtaggtgtgaagaatctatttctgaattacttattataaatattttggaarggcaaatactgatggttgaagacatacaaattcactaaaattgagaacgataaaattatgactaggctattaaagttatagagaggtgaatttatggcatggtaaaagaataatatttattgaaacaccatcttaaaaatggcacagatcaaaaatatggctagctttgcaacattttrgttctcatttcattacagcttttgaggtctgagggagagcttacctaagcaattaagctactggttaagaaattttgtgtacatcttaagactttatatgactgatgagagttattactcaagtacataatacgaatgaggattttgaattgcagcacattgtaggcagtaaataaagacttgctgaatgaatggatattttttctaccaatgatgaacttcgatgcaaagaaatggcatgactaaatgttcaagatatttctgttgcaggaaattcataaaaagtaagagtaactatctatttctaaaacaacatctatcagaaatcagtctggtcagattctaccttcaaatgtacaatgtcagaactagaaaggttatgaagactaacacactttactttttaccctactgacgacattctctgaaaattcagttttcttgaatgtcactctaataccaaagtattttccccaattaaagaccaagtaattatgtcatttagggatagcattttctctagataaagtttggcctctctgttttcacttaacaccaaatggattacttcaaatggatagctacagatcaattaaatcaagctttgaatttttaaaaagttttactgaatttttatattttccaagcataatcttcatcatgtggcgaagctttaattacaagattacagaaagccaaagacttctaagcctttagggctttgctcatattttcttctcttactgcccattttcctcaatcaacctggtgaatggatggttagtggacataaaccaggttaatgcttatgccctcataattgttttttcttactgaccatgctctatacccctccctttggtgaccctgccttcctctcttgtgctcctgaagcttcccatyatcattctgatactattgtgccataatttctgactttatgtatctatatatcctccctaggatggtgagctgttttaggatagttcctttgtctttcgattcaccacaataacctgagtttatttttagcacaataccttacataacagacatatagaaaataattgttaaataggcaaattttaatagtggactagagaccttgggaagcagcaaggaaaccactgattagataaatattaatgtggcaaactggctttcattgttgtgagggttcttaacagtttttctcccacttctcgctgatttactatcactcctggcatcataaattcaagtcaataaatgttctgcatatatggggcaacatttgaactctttggagcagagatgtcaygtaggttgtaggaacaaatgtatggctccatgaaggttgataggaatgtaaattttaagctggaaaagaaagagacagcactcagaactgtatattcacttatttgtattaggtgagctaccagaaaaaawttttagaggcatttcatatggawaawaattcatgttaaaagcatcttcaaagattgcaacaaatgtaygcccaatccactgtccatattttttgagacaggatcttgctctgtcagatagcctacagtgcagtagaatggtcatagcttcctacagccttgaactactgggctctggcaatcctcctgcttcagcatcccaagcagcagctgggactacaaacatcagccaccagggctggaaaaattgtattttttgtagagatggggtctcactttgttcccgaggctggtctcaaactcctggcctcaagcgaatctcctgtcttggtttcttaaagtggtgagattataggcatgagccactgtgcctagccttactctgtataacaaattttgattcttaaaatattcataatgtaaccaactattcatattggactaaaaacttaccaattaagtttccattatttaaaaatataggatatttgaggcaggagtcactattcattttattttctatatttcctttttttttttttagaacaaattcacttatataaacaaatagtgtatgagggtagaatatacttttaattccatgcttttgaaaaatgtattccggactacagaccattttaaacattttttttgwtatcatctacatacagcaaaatttactctttctgttgtacagctctgagaattttttctgtgatcacacctaaaggaattataaatgctcatacacaattttatwttgttctgttttgtttcttgagacagggtttctctctgttgctcaggctgaagtgcagtggtacgattacagctcactgcagccttggccttctgggctcaagtgatcctccaatctcagtgccccaagtagctgggactactggtgcacaccaccactgtctatttcttaattttttgtacagatggggtcttgctatgtttcccaggctggtctcraactcttgggctcaaatcctcctgcctcagcctctcaaagtgctggggttacargtgtgagccaccacagttggcccagagtttttttaaaaacataaattttcctcacttttgcgtaaatacctagaagtaggattgctgtgtcatatagtaaatgtatatttagctatataaagaaattgtcagacttttgtaaagtggttgtgccatttttttttattatactttaagttctgggatacatgtgaagaatgtgcaggtttgttacacaggtatacacgtatgatggtggtttgcttcacccatcaacccgtcatgtacattaggtatttctcttaatgctctccctcccctaacccgccaccccccgacaggccccagtgtgtgatgtttcccgccctgtgttcatgagttctcattgttcarcccctacttatgagtgagaacatgaagtgtttggtttyctgttcttgtgttagtttgctgagaatgatggtttccgtgcccggctaaggttctatagtttttacttgggtttataatacatattgaatttttatacaaggtgtataaaaatttcacacaagatgtgaactatgagttgaggttacatagtttttgcaaaattgtttcaacaaagtttgttgtaaagattatcatttccctattgaattgcctttgtacaaaggtagaaaaataacagactcaacgtatgggtctatatctgcactctctaatcagttcctttgatatatgatgattaatttctcaaattctacagcaggatagctcttttttaaacctcaaaaatgtgaaaataattttccttataaataggagacctgagagccttttgtatccttggcgaattcagctaaactttctgggctctgtttctttatctgtggaatgtggaattgcattaacggaaatctgaagtcctgttttttctttcttttcctcttcccttcttttcactttcctcttcccctcttttcactttcctcttcccctcttttcactttcctcttcccctcttttcactttcctcttccccccagccttctcagcccttctcatcctttctctctaccttcttcccccacccccatattctttctctgtctggtcagtagatggtgctgtgctgcaagacatgtatttgctggtttcttaaaacttttaaatatcacattatgtcatctgttaattctacgccttatgactacactttgagarctgatccttaaattgttaatggaacaacgatgttcacacccctccctctttgagaagctaaaccccaggcatgagttggctacttaaactaggtacactttttcactggaaactttgtcaagagataaaggcctttgattaagaggaaatattttttaaaagcaatagtgggtagtgaccctgaaaaccccaaatgtccttcagccccatgtgtgacatttgagttggtgtgtgtttacccaagggcaaaaaatggatggccatgaaggacataggataggaagcccctttgctcaaaataaaatcccaaggttaatttgtttgtgaatcacagagccagctgtctgtcctggcccagtatgacttttgtggtgacagctgtttctaccaagatttgacgagtgggaatgagggcagagctggtggttgcgagatgggatggaagtgggagatggattgcaagtatggactctggtttctttaaaaaggaaacccatgggtttttacatattctcaattgaacttgtagttcctttagttscrcataatgcttttacttcccgggagagaagaggtgggtgtgcatggttagttgtttcttcatgtccccttaggttacartttaatgatgggtgtttcattttccaaaagtttagcaaactgtgaaggtttccataaagggcactatatttgcttgcaaaaatccagtctttattcctctggccccaaaaccctgaggtactgtggactcaagtttcttagagcctgattgttaaaataccaaatgaaaggcacttcttggggtttatggcatcatcctggtatttccatgtataaataataataatgttcatttgatagtgctttatggtttcgaaaagtaattttaccaacatatgcaattatgcctttgcttagaaagtagatatttgaattagggcattggaggtcaaagccagagaagatcagtgaggaagaaacacgtaggttactgatgacttctatcctcatttaggtctccaattgggtgtttcaaattaacacaattgagcttctacatccatcccctagccactcaatttcctatctcctccatctggatacatgaaaataccatccttttatttgctcagcccccaagctttggagttgtctttgattctcctctttcttattctacacctgagctacaagcaaaacctgttggaattacctttaaaatacagtgtattcagaatccgaaaacttctcaccacctccattggtacaccctggtctgatccactatcatcacttacatgaattaggacaaaagttttctaatagattcccctgcatcagcccctgtccacactttaatttaggcacagcagcaatagaaatgctgttaataggtaaaytggaccttgtcaagtcttggcccagaaccctttaaaggcttttcgtctcacattgaggaagtgcaaagacattacagtggcctacgcagtcctgtgtgatgtgacctcttctatactttgggatcctatttyctatcactgaccctctcttactcactcctgttctcctgactccttctcagatgtyccaggggtgctcctctcttaggatctatttacttgttctttatctttgaatgctcctcccccaaatatgattctcactctcatatccttcagatcttgaatcaatgtcaccttcttactgtggccttccctggctgcttaacytaaawttggaccctctctcacattttctgatcctttcctagcttaattttttcttcagcacttattacaaacataatctgcacttaatttgtcttgcttaactttctggaatataaatttcatgwgggcagggattcttgtctattttattcattactctacttccaaagcccagaggagtgcttgacacaaaagraacrctcaataactatgactaaatacataaatgaatgtattctccaccttgttttcatggtatgtgtgaggctttgcaagtaccaaccaccaaagaaaaagactaatgcttgaytagattcttggagagtaaaactcaatgctccaccatcactttgtgaaaagtaacagtttcatggtctaaattatagattctgactcagtaggtctgggagtccatatttatgtattcctcaagaaattttaaatcttaaccagatctgggggcccgttygtctagagaacagtttacctttaactcaacaaatatttattggatatattctatattccagaaattatgccaggaaatggccctgcactgaagtctggtaggagagacagatgtgtaaaattacacttgccatgtagtataataagtgctttcctaaggcatttattaattgcaggggttgtgaaagacraaagaagaaatyatctgaaatggatctgaagagttctcagaggaagtgactcatgttgaagaggaagtgacaaagcaggtaaggaatatagggcactgtagttaggaaaacatcttggcctctgagttcaagacgattgccaggttcctgagtcatgccttataccaatgaagggggcaaagttagacagccatctatttttgcaagaagttcctatctctttttatagccctctcttccaggtgtctaggactttaactgtcttgagagaataaaaatacatttctggcttatttatctggttctcctttaaaaagagtataatgagatcctttctaatactgagtagctaatgattttctggggtgttcacatttcaacaacaaggcagcctttaataataaaaaacaattaggcaggtatcagtgacaagccagcaagcagatattcttttcggctggaatcttcaattttccttgagtcatatcacatgggaaggaccttaaggttggtgctagaattggtctgcagtaattctctgccaattcatcacaatgctgggggaaatgataaccactcttgtctcttccaagctttgctataggtcttagaccaatgcctttgtttttccgtgctgcaattactcaatttttaaatatcatatttgtgtagagcattgtactctgttcatttatattagtcaaggaaagtagtgtttgctgctatgacacacagtccccaggtctcagtacctcaacacaataaagttttatttttttgcttgtatcatgttccaatgtgaattccaagaaaatggggatgggtctgttgtttggacaggagcctctgctttgtgcatccattcagagataaaattattttcataatggggctctgcaagatccagtcgtgcttcaaaaactggcctgacatcttccagatagcagatgaggagcaaatgaaacaggacctcactttaacatgccttaaaccaagagtcagctaattttttccgtaaagratagtacatatctcaggctctgagagccacccaatctctgttaaaaactacacagttctgctgatatagtgtgaaaggagccttagacaatatgtaaatgagtagggtggctatgttccaatgaaactttatttacaaagacaggtgattggccacatttgccctgtaggctatagtttgcagacccctgcattataccaaaaggtatgtcttccattcacattccattggcaaaaaacagtcatatgtccccacccagatgcagaatgtcaggggaatgtactttggctgtgtgccaagaaactggtgagaatttagccagtctctgatgcatcatatattagrggtaggatgttcattgattatttcccagttggtggacgcactgttctctacttccaacttgttcaaggtcaaaaattttcctttagaagacatgatctcacaagttttctaagcttctttatcctttattytggggaacaatgaggatggtttgctgaaagtggtcrtgaaagatcctatgtagaccaggtgggagagtttgctcccaggaaaaaaataagtattacctcaagtaggtgattgaagtacaacatgctatccactggtaacaagtaatcataactggatggcaaggataagaatcactctgtgttaactccactttcaaattcagccaggagctaaagctcttctatgtattggtttcctttttgtcttcttccaaagtccctggagatggatgaaaactttgctctgcaagtatgcattcaaaaatctaattataccagcagtaattgagtatgtggtaatctgattccttgcatctctaaaggcctccyacttgatctactgtgaactcagaaataaagggttctaacaatagccctgtaaattaagcagagcaaacatttggctaaaaataaggtgagggaaggcttactatataggagttacaaatatctcacaatccttgttctcaaactctcacactttacaattgtttgacagattgagtgcaagcagtcatgcctycaatactccatggctccccttgcatctggctggcctagttacttgttttggccaataacatggtagatgtgatggtggaggcttgcatgctccacattctctttaaactcttctgctcccatgtgcgaaagcctgggctagccaggtgggagatgacagagaacatggagtagagatcagctgtcccagytgaagccttcctagtctagccagactggcaatgtggcctccagatgtttggacagctcaacagaaacatggaccagatcagaagggctacctaggtgacctgcagatttgggggttgttactcagcaatagctaactgatagtgtgtcaattatgtatgcttttagttttaagaaaagacttgctcacaggggttggaaagcagggacttatttgtmtttataataggaagaataaaattaggtacagggctggttcagtgcttcaacatgacataaatgagtctactgatcatatcttccryaacttagtttgctggatttcattctgtcattggtagcaacatggttgccagatggctgatttatctccaaaattataatggtgttcaaggtggtttgaagaaacaaggaaaaatggsaaaagaatgtgatggctgttccttttaaccagagaagtaaaaggtcttcttgaatccccatttcaaaagatttctgattatgtgtcattgggctaagccatgctatatgcctggaasgtgtctgggaaggaggaagttgtatctgccgcaagaaatcaacagacagatgattggtaggctacgtttccagaggatgatttttcagagaaagtctcacagaggtggtaactttcggtatgacaaagggcttctcgggtagacaagatggaaaagggcattctgctagagagagctgcatattccaaagtacagagcaatgaaggaacatacctatatgagagcttcaaatctataactgaggctcagaaaagggcaattaytcaccaaaggtaattaaactagagattgagcgagcagggtccatctttagattgtagtccagggtgttaccacacctggcaaaagtagaatcagttcttaggacctcagagtttcttgttcatgtccccttcatggcccttatcacactgaaatagaggcatctttttactaaaaagtagatctagaggtcacattattagttggcaaaatcatgtatattactcaaccttttggccttagtttttcccaaagtactgctaaagacatcactcagttactcagaaaaatcacctctgattcaccctgtttatagacatgaggttttgagatctattcatttcacatcaataatccctcacattcatcctattggtaccagccagtataarcctctattacctctcaaatatctagtgtaataaactaaatatctacctatttcctctggccccacaaatccagcctgcatttgaattttgtgtggctctttccaaagctcacttcagccaggcaygattgggttcaatcytctgtctcccactgcctctctaagtacaaatttctgaaagtcactccagaaatttttatcactttacctggagacagacctcccaacttcaggtttgtctgggagagtcccagatggaggctcttgtcctggtgccmagtcaggtttagcatttgttctcacccctgtcactctcaaaacttaaccagctgggatgcaaaattacatgacacttttaactatttctttttttataggctttattattctctgaaagtactgagttatttattcgaggcacttacaccgaacagtcttctcaatgcctgagtttccctcttataagatttaagtgaaaatgaaaaatgcgtgtttgcatgtggaaagaagagggtgagaggtgtgaaccggcaagcaggaaacaattttaaacttttactcaactgatggagacagtgcaccaacaattcttatttaaacattgtgactgcttggatgtttttcatttttatttcataatgttgcttctactagtagatgtaaagaaaggcattgtttttcttggtcaaaggaagaatgatgatttgctcacttctttgtgggggttgaagaatataaactgacagacgtgatgagaaaagaggatcagttctcttgtccttttgtgtgggaggtgcgggcttgctctgcaaattcatctgggagatttttacttgcaggaacttccagtcatctgcagttttccatatctggagagaatctgctagaacatctatctgtctcaagtcatggggcatgagatgaagggcatccaaggacaagagtgtcacrgactctgagttgttagaaccctgagtatttctccccaaggatgtcctttgctactcgtggtacctggagtcttaataaccctcaccaatttcctcagcaatactgtggatcacggaaggctaactatggtttaccatcatgcaaagtaccaaatgcattcccagttccaatcagcagacttacacgcaaacctgagtagtgtctatgccagcactgctgtgagagaactctagacaaagatggtctaggtcccaaaggcagtctacctttgcagaggaggtgcactttccacctgcgaataagctggaggcagttgcaattattaccayargacgaatttgaaaaatgaccaggaagagtcagaatcatacctggtgtactggaagtcatcctagattagaaaattaagtttgaatatgaatttagtgctttcctcagcagagaaaaccagaaataaataagttgttgcttgctatctgctaagaaatcattgtttttttcctgcttctggcctcttttctttttctgattcatttatwtttttgaaagggaaataactcagtacatccagaaaacagatacacaggaaaggggatttaccaaaggtaacagatgtttttgtacttttgaagaggtgtaaggttgaatcatgccttttaaaactagagatatgcacagattaccaccctgtgggggttataggcacttgggggcttcttgtcaatttaatatttttttgaagtataatatctcagcagtgaaaggaaacagaagcagctaattctgaacctagaggttctttcctgaccccttggtacctaggcacaagagggtgagttcaggactgagttaaattctaactccctatttcctgtcttttgttagttttaatcagacacttaaacacacttcaatgtggacctttgtgtgggaatgcctttgatttttttttccactcccaaggaatgccagctaagagagggagaaaaataggataaagttttaatcatatgtaatatgtatcttaagaaatgatgtagtgctttaaaaaaaaaaacaccaaagtgctagactggtgaccttgcagtgcccttctcttagagttagagataatctaaacttcagtcttagagaaagttgtattcccagtcctctgaagcatgcttgtgtctatgagcaactcccaccacacaggtaatgagccacatggctcctgggtccatatcctgtctttgtgaatggaggctgaagctgtggtccgtgggtttggaaaagtgagagctgtatcgtaaatgcttcccttgagytagctgacctagttacctggtcagtcatttcaatggatcatcggttgagtgtgactaatgggccattagatttgaaacgtttttgcttaatgccgtctgttcagctgccttcattgggaaagttcctatttccactcaaataagtggaagggggatgtctggcagggggatgatacataggctttagttaaggaaaatgatggaaaagcaaataacaggcaaggatgagtaagagtgattaaaagagttaagcaatagagttaacactgtgccctcatgaccacatgtttaatagagtgtgatacatacttgtgatggagaaacctataaacttataattactttatggaaaacatactgactacaatgtatcagttacattttaacatatacatatgcacatatttatttgtagatatatatgtagggtgtgcatgtgtgagtgtgtgtatgtaaacgtggcaaccatttgctttaaagggccctattacattattctgttcgtgttctaatttagtattatgattttaacagatacattaatttcacttccacattgccttacagctattgtgttaagtttaatagaaaacattctctatattctattaacacacagtcaacctatgctatttggtagtttatgcacagacatattcaataaaaatgttctattacagtgttaaagcataattttcaaaaatagtaaaatcatgactctcatccaaatgtgaaatgaatgcatgtcaaagattttatttgactcattaataaatgagataaatgaggggaccagtaagatcttttttttttttttttttttttgagaaggagttttgctcttgttgcccaggctggagtacaatggcacgatcttggctcactgtaacctctgcctcccaggttaagaattctcctgcctcatcctcccaagtagctgggattacaggggtgcaccacgacgccaggctaattttttgtatttttagtagagatgggggtttcactatggccaggctggtcttgaactcctgacctcaggtgatctgcccgcctcagcctcccagggtgctgggattataggcttaagccaccgtgcccggccatggggaccagtaagatcttgactggttcaaatgaaaatctgacttgcagggatttgtgtaattcatttgcattgctatgggcaggaatcattcacattgctattcattttctacaacttaacagtcacccctaaataatttaaaaatcgccaagaaatttttatgtcactttcaagacttgagtgcattttctagaaaatagtttctattgccttcttcattaattcaagtacttttgaggataaacttatgagtatacatgggagactggtatatatacatgctggtaaacatgagaaggtgcttgttccttaggagctcaatatttacaaagagagagrgattcactgagacaaccacagtttatttgatatatgccaatagaatcttaatgaatcattctcttatgaagaggcatgcgtggctctacagaagaaatattgtttgaagagcgtctcactggttgagacagcaaggcaaaaggggtgatggttagggggttgaaaggcagacttttcattctacctagagmgaatagaataccaaaagcctcaagggtataaaaaagcaaggcattctgcacagatcaacaaaactccagggcactatgaagggtcatggctgagaggtgaagttctgagataggaaaggcaaacttaaccgaaaaaccacattgccctaaaggaggtggaggactagtgaattttaagcaggagtgagctgacaacttccatatttagattcacactacaaaataatgtaaatttgtatcaggaaaactggttaaaaacattattacaatataccagaagagaggatcattactctgccccaacagtctaacactttgaggggcagaattacgtttgtttctggagaaggggcttttccttcctttttgcctcatttctttgccgttactcttccccgctctgccctcctttcatttgtsacttcctttttccatcctttcactcatttctccctccctcctttctctctctttgtgaccccatttccactaagtttagtggcctaggaagcacctgttgcctgtttaaattactgagatccctcatgtagaatcagagtgatcctgggtggttctctgattctcaagacagtcctggatgaacaataatacattcttacactctcttattttaaagtcagttgctaaagcaccatgacatcatcctaagcaaggtaaaatacaactgcagagtttactgctttataattataacatgccatccaattttcctgagccctctttgaactggaaaccctttgctctaacgacaaggcatttgcaggtcaactcccagaatggactatttccacaaatggctaatttagtctatttgtcttgacttgtgctaatttccttccaggggatataatttttctgaccatattaatttttttctttttaggtggtagtggcggggaaagatgaaggagagaactacaacggtattcctaagtgacgtccaatagcctaaatttatcacagttccatcagaacacccaactcattcactgagagggattttatccaagtgtctgcctacatttaacccagttaagacaattcacattcaagtgtgatcaataacaaatccatctaagcttgaccttcttttcaaagtaggagattattaaccagcaaaagtttcaagctgagtaaatttggagtatgatgtagaaggagaacacataaggcaacttcacaggaagatgtttgatcatttagtatctactgcatttaaaaataagatcattattttttaagacaagaacattatcaacaagatcaattctaggctggtctaaagcaatgatctcacggtagctgtaaaatagttggctgtgtcctatctactctagggtcagtttgtgtgtctgtgaaataagggggctggaccaggatagggacaaacatgagctgtgaaaaatcagaaagctatcatcgtgttattccttttcaaatatgacagtaagmacacacacacacacacacacacacacacacacacacacactaaacctagctgaaaaatgtatgcaagtaatacatgctcacggtgtaaaaatgaacaccccaaatcagactaaactccaaactggaaaccctttgctccaacgacaaccctttgctccagaccataacaacacaacatccaatcatacacgttgttatgaagtaacagcagaagttgccttctacaccattaggacacctagttcatttctcaaagataattaagattaatttcttgcatatctttccgaaaatgttcttagggcattgtgttagttaaggttctctgggtttcaggccacaaaaaataaactctggctgacttaagccacaaaaaagaatttactggaatgatgtcggggtattttgcggaatcaagggaggattaaaccccttagcctttggaaagagtagtctaaaggaaagttatgagacaccccagcaccatgtgtcagacaattgccattaatgtgacttcgctacaaagaatcccagcctcggtatttctgttttaaattttaaataagactggccaagctaggttggacctgtgagatgtagtatagctggatgtctgggggtgaggaggttagaagatggtcaaatctcatagtgtagaaagttggggaaactttctggacagrgtgaaagggcacttgcaagatagccatctccatttgctcagaaacaaagcacgtatctacactgtatgtgtttgaatctgaatctgctatctttcacttttcaattatctctgaagtcaggaatgcattttatgattgactctgtcttagctttaactaatagtttctacagaccactttttctttctctgtggcttacaaggtagtgaaatttctccagcttagcattccagtaacttccacacaggtgggaaaaatagtttgttccctagtcaggtgttccttacagacatgttagaattgtacacctggtgctattttttaggaattcctaaattgaaaactggaggctgaaatcaccttcatagaaaagccttttagctgttacaattaaattaaacattatataaacactatagagcttatttgaggagcaaagtacaatgctgggtgctgtgtgttagaataaaatgaagacattggaattgcctccagataattataaattgacaccatgcttttggacttctagccttcagaactgtgaaagaatgaaattttgttgtttctggaaatttgtgacagcagccctcagaaactaacacacccaagaagaggtcgctctccctgagcgaggctgtacactgtgatgaaagcacaaaacatagtgaaggttatgggattttctttgagatctggttttggtggaagaagggttggtggaagaagggctgttatgtatctgaagctgtggatctttagcaatttagttcaaatatagcctgagtttctgttaaatccacagctggtgggaattttccttctggtcaagatggattaagaactttatttacctgtttaactgaaataatcaaaacaatcagactgccagttgcggtggctcacacctataatcccagcactttgggagtctgaggcaggctgatcacctgaagtcaggagttggagaccaggctggccaatctggtgagacccttgccccmccatctctactaaaaacacaaaaaattttccgggcgtggtggtgcactcttgtaatcccagctattcgggaggctgaggcagaagaatcgcttgaacctgagaggtggaggttgcagtgagctgagatcacgccactgcactccagcctgggaaacagagtgagactccatctcaaaaacaaacaaacaaacaaacaatcagacaaaatacatgggtaaaaaagtttttaagacgttggtcaccaagtgccacagaacaatgattcttgagcgatagcaaataaatgtggtaagtcctataattgccacagcttactgccttgagaaactttccagactcatgaggagagaaccaaggcagggcttggtgggcaacctgggtagaggagagatagctgaaagtctggggagacctaggtattcaaacaacagagtattggaggagaggaagatatgcatgagaatcatccacacaaatgcatgttgctctaatgcattaattttcattgaatgccatatggcctacttcaagatagaatacttcacaataactcatcaaagtttagggcttctatttggaaaatcctttggaatacactatatattttaaaatatcatttctatttaagatcatgcatgagtcattatcaaaatggacatgtgaatgacagatgcacctgagagcaataacttaagcatattcttaggagtccttcttaggagaaggaccctatgatctaagaagaaagtgtgttcagagtcccggactaatgaatccagcaatggccaacctggagatccactccttatctatgaaggacatctgaatccccaatccatccttggaatgcaggccatacaggggatagagggcctttgtttggcttaaatggaggttgccaggtggaagttgctaagtgaaaatgctatacgacctgcatgctttttacaaatggttgcagttctcttgtccatcctctgccactggactgtctccgtatgtaagtccccttaataaactctatgtctcattttctgacctggtcttttcttcagcctctcgtacatggtgccatccctattggaatcgatagagatctggtatgacaatggaaagcattcctctatgcatgttcagtctctcacatccactgtaggacaaataggactttggctcccttcagttctgtcatctgaggagggtcagtccagtccttctggcagttgtgatggagaaccagagcatgaccatagaaggatgggatctgagatgtgagaggagaggggaaaggattagcaaaaaaagcagccaaccaattgtcataataaagtggtgaagcagtgaagggccagaagtaagtaggagtcaatttctggaaggtaggagggttagagggaaatattcttttgctattttgaagaaagtatcttggaaaactcttctatgtcttctgtggataaaagtaaagaggaattttaaagtattattggagattgtctgttctcttcaagaatttcaaaaaatgcaaataaagaatttattttgaggagtcttatttttgtataaacgatgtccctttgactgcatcacctctctgaggctgaaatcagaaaggaacatagaatagtacatcatccatgggatattatatcatattatgagactttagaaaacatttagttctgcttcaggtgacatatctcattagagacagaattattttaagaatttagatttagattctcacctaactctttcttctgtaagtcacatttcatcattttagtctttcttcaactctttgaatgaatgaagttttcctgcagtcacttctgtttcctaccagtttgttattaagtttcttgctttctgattgattgcttctgttccttatatttctaaacccagactgtcagataaggtctgcaatgcccaaacaccaagccacaaaatcttagtttgtttgaattcctctaagatcaatctatcttcaaggagattggcattcaaatgttcagaatggacttgtggggaaagagtgaagagcacatctcatctaaacaaatttgaaaaaaagagatggactttcttgagcctggtgcttatgaatgtgtgtcctcttctcccctatgaaaatttcgtttgaatatcattttaaaataagcgtagaaactattttccaaggccctttccacatacaggtgggtcagtattaacacattatttgtattaataattcagtgttatctctcataactaatatgctgcaaatattgaacgggggagcagctgtgtagctgctcacatctgaaataaacaaagagccagtgtctgtaaaaagaaagagctcaattcataacaaaactgcatatatttctaatataggaactatagctgctttgcaaagttctctctagaatagtgggagacgttattttacacattcagcattcaccagctttaactttccaaacataacctgtttcaaatattttagggatattttttgttctgttttgtttttactttccctaaattggaaagccaaagactgccttctgggggtcaagcacttgattgacagtagagctctggtctgagcaatcagaaggtatcaggcaatggtgcagacaggaagaagcagagaatcatcaggtagaaaaaaggccagaggccctgggcttgaagtcttgccccatgtcagaagtgaggtctgagtaggctgggatcagggccaggggaaggcacatgatggtgggatgttgcaagggagtcagaaggagttgggaaaggagcatacagagtgctggaattgtcttgggtgagacagactttttctattggggtctgcatgcaaaaatcctgccaagtctcagtcctaaacttaagtaatcaggttggtggaaggaaaaactatgaaggaggtaaggattgctgccaacattctgccatgacttttcaacaccccttagctcttttggcagattctctccatccaggtgttcagacccccaccctcccttttcctgaactacagcttccaaggtcacccacattgtagtatcattaggtatgacaagcttcatatgccagacttttctctcctagtttttctgcttcccccaaatctgattccttctttgcttgtgcccttgatctttgttgaagttaatttgacaactgatgggagctggagtatcaatgagtgataatgtctcagtgtttccttcctttctgatcacatctgtactcttcatcatgcagtaaagcaggacttctggaactgggcaggagagaggcctttccttaattccttcagattgtagcttattactttgcccatgaatgggggccgaaaggataaaaaaatatacctttccctcatccatcacaaaggccatgactaacactcctataacaaaagacaggttagcaagagaaacacatcacacatttatttaacaaagttttacatgacatgggagccttcagaaatgaagacctgaagacccagggaaagctgtgtgtttttatgctaagtctaatgaaagaagtggatagttgtggagaaacatgatttgacaaaaaaggtatgatctaatggtaataaactgggggaaagaggagaccctagcaagacctgtttgttcagattcttcctgatctctctgtgtagcattatttccccctggatatggggcaggaccctctggaatgagggtcttatggcctactttcaagggaggtaagtcagaatgtggcctttctaagttttatggtttgctttggggtagaggagttctaatttctatgacccacctttgggagaggaatctggtttctatgacatgtcttagaagacagaagaaagagggaaaaggttggagataccttgttgcagaggcctttcctatctcctccatttcaaagtactcagcatgccaagatgtcatacttggtagtattctgctctaagtccctacagggcaagctttcagagtatgaacttagctgttagagtggctgtggtttaggagaagtagagggaaggatggagtttgctagaggggaaaatcattcagaaactggatggagaataaagacctgtagagctggggtgggagctaggttgagagtgtacatagacaagctttgagggataaacacaaaatattgtaaggacatcatgagtggctgaggaaattccataagccattttttttaaaaccatggcttgagctattggatttctataggatggtttttctcttctactctgtgagtatagcccagccttccattcttctaatgctcattggttctgttacagagtctggggatggaaaaggttgcttaggtgtcagccaagacactccctctgcttgggggagagcaagctgccagcccgactatccgcttcctgccagcttaaggagcttatgactcagattcaagcaaaacactgagctgaagcaaaaagggagggagggaaccttagctcagatgaaggctctagggccaaactgcatcactgaaacatccaagtcagggaaacccatcagaccaggaggctatgtgattttgtgtttgtcctctgcttcgaaaaccacaaacatatgcttacacacaactccatttctctcctactcatacagacatatttccccctgagctgaaatcct

SEQ ID NO: 95889 - DNA, 313141 bp, Homo sapiens
  misc_feature (1)...(313141): n = A,T,C or G
gctcaagggctggcacacagcaggtgcaccatccttgtgaacagggaggatacaaacttggtggcttactgcctcatggtgatcctgcccttcccaccccttccccttcattcccatatcagatctgttctccaggccatggcgagtgcatgtgaccgtggctgggaaggtacctcattcccctgcccaccgtgattggtccagaggttgtcctaatcatccatggtaggccagtcagagcccttccctaagattctttttgggggaagctgggagagagctttgatgtggttcgatacaccaataccattgtgtatttcaactctgagggcacagagctgaaaggatgtaagcctgggtcctgggtgggtaaagcctgcctggagctggggaagatgagaagaggaaggcctgcggagggcccagtgaacgagacctgagctcagcctctgtgccctggagtcctcctgcctttccttctctgggctgtagttcactttctaataaaggtcctttgggtttggcggctttgttctgggcctccttcacctgcatcgtgaggagcaccagcaaaggccgcctgacactgccctcaccaagaaatgagcacccccagcttcacaactttcccctacccctgccaggaatgaaggtgctgtcctattcctgtccagcgggctcctggacaaagaagggagagtctctgatctccaggcgctgctgatcagacagatggagggatcattctgaggacctcagtgtctgtcattccccactcctagattgagtggggttatctcaggcaaagagacaatgggacagacggccaccggcaccagccccagctccaattctgccgctcaggtggtgatcactctcccacatctgcctcctgttaccttaaagcagtggttcaatgtgctaggctggtttgaagcagttaccctgggaggaaatgcagccacttttcctttctaaatttgtattttggtgactgagacagaacccttagtgtggctgtttttcttgtcttaatttcattcgtggtttcccagtcagaagcaaatgacagcaaatcacaatctcagcatcgaaatccccacgtctcttgctttaatttccaagtcacaaaagcatgggcacttctggttcatcccagtggggcaggggaggggggrgacccacttccttctagtgacccaggtgcacactccccagctcttcacaccatttaaaggattctgcccaaactgccaaccatgtgttacaaataaagcccttcccgaaaatggaycaaaaacactttgtaatgagtgaaggagctggtttaaaaagggccaacatcaaacaaaatcccagtcctgagtcacagacactcaaatagccccttccagggtgggaatgtcctccaaagcacttccatttgtgtgagtagttcttcaagccaacgtatccaaatacatacatctgatgagcggactttgcttgtttacatacattatgtacattcctttgatagtcaattgtctaaagttggaacagttcggagggaagagctatataaggtttgcaatgatctttgtccaccagttactggacaactggatccaaattccacaaatagctgtggttctttacctgcatggttctcctcccctgagacatccagtgccatgcattttctcttgcaggtctttccttgcatcacccctccaaccccagcagatatcctggctgagcctgttttctctgtgaggggctacactgcacactggggctcttgaaaagggcttgctgggctgggcacggtggctcacgcctgtaatcctgacactttggtaggccgaggtgggtggatcacctgaggtcaggtgttcaagatcagcctggccaatatggtgaaaccccgtctctactaaaaatacagaaaaattagctgggcatggtggtgtgcacctgtaatcccagctactcaggaggctgaggcaggagaatcacttgaacccgggaggcagaggttccagtgagccaagatggcaccattgtacttcagcctaggcgacagagagagactccaattcaaaaaaagaaaaagagaaaaaaaaaaaaaagaaaaaaaagaaagggcttcctgcagggacagtcagtgcaggaaagggcctctttcgtactcccactgcccctacgcatctcctgggtagaggtcgctgctccagagagcaaactatttcctcatctgtgtgccattccactacaagccccacaggggcctgcaacgagtcccataaatccatctccaggccctgcacccacaaactggcaaaggaagtttcaggaaaagtctttctaataggagtctgtgggctgcctctggttcgtttctttaggaattctcctccatgcccttcttgacacaaaagggcctgaagggttccagttctcaacaggagctcccaggggctcctggcaggaggatgttctgcctctttggaggaaagcaagagctaaggagcccctcctgttttagttgcacctccatcccctttctccaccctgcaccattcccttaccctctatgtgaggcaaagcctgaagtccctccttcccgccctctctcctgcccactagtagattacactccctgctgcagttacaccatgatgcctctgccatgctgacaactagtgtcacacaggagcgtaatcagaagcacctggcattcaaccccggtaccgatggcccccaccttttcatttcaggcttcttcctccagagtgcttgaggctccctggcctcctggcctctcccaggtccaaggcgctgactccagctcttggctccaacatttacaggaacactgggactaagaaaatcaattgtgttaatcagcaaaaccctccacttgagatgctatcctaaaagcaaaccatatgtaaaacacttaacgtggggagctctgtaatatgtttcttttgttacacgaccatcacacatttgtccggagtttggggctttcaaaccacataaggttttatgtgatcgttataaaatcccttcatttcccaaaggtagggtagtaaggattaagtttgactactgaaggcagctttgttgtaagtggtctctaatgtcacaaaagtagcttgggaagacaggcttattaaacaaatttcttgggttgcaaatcattagaagcaatcgcatgtcatgttcatttgcttaacccgaaaggtatccatttggatgtttaaagaaactatgcagattaacattgttcccagtgcccacaagaaagctggctkatcttaaaggaaatccagggagctccttgaggaagtcggactgcagttgagcatacccttttgtggttttcccacctcttttgtaaaaagttcttcataggaatctgtgtctggaggaaaaggggttgtgatttgttaatctgaagatgggagacctcaaaggaatctcacccaaccagtcctgcactgtcatcctatgaacagagaagtcaggtggttgctcagtgaggggcagggctggcaccacatccgagcctccctgtcctgtgttccttactcttcagtggacccggcgacctcccggctttggagccatcctgtgttcctttaacagtaggacgaacacacaggcgatgatgagattgtaatgggacaagggggagaggcgtggggagctcttgatgaaaacttgggtttttgaaattaccatgatgaagggaggagcttgcaccagcaggtgtaaggagtgtgagtttgagttctgctcatcagacagcctaagcagtcacatccttgaatcctggtcttttgcaggccagtccttggtcaggtggtggcctttttcctctttcccctctgcactgagacccttatttggctcctgatcctggagcccctgacacagtccttaccactgaagtagctgtggcccttcacatagttcttcccaccacgccagcaaggggactgagttctttcagtacagccagggccaggtccacacatctccctgggaagccagcactttctctcgtggaccgcctccccattcccacagggccctcctaaagggcctttggatgaccacattggcctttctttcctagggtggggaattagagatgctaagactggccagtctctttttcttaagagtttagggattcgtcttaaaatattattcagataaacgtatgagtcatgtgttaactgcaaaactacttaacagcacacttgttagaataccagtcggcactctgattccatttcggcattgtttttcctttggttctattaagatcccggttctaactgggtcctggtagtaacaggctgtaagtggccaggtgtatagcattatttcttagtagtgtggtgtggtgctggtggtttattttccctatgcacacatgccctaatatggaaggatagtttgtacacacgtagggtacgttatcatgagactcctttacagagtatgaaactgaggattagagaagtcagacgagtttcccgaagtcttatagaaggctaatggaaaaaaccagagccaagggcaaacatgtttcatctgtccttccacattagtttaaatgtgaatggctgcttggaacacagtgttgagaaggattccgaggctgtgtccaggttcagtggggaaaaagtgccttgatttgaccattatatcgtgtactcagggcctagtttatttcccacaagcagctatttaaaacatgtctcatccaaggcagggtcggggtggggaacctcagaggatcaatgatgcagcctgtattgtcaccagggctcatcccaaagcaaatcctgctgaagttctcctctgaacaacccttatcactcatgctaatatgttggatcctgcaagtcacaaatacgaaggtatgagcattggccgaatcccaacagggaaacttcaccgggaaggtgaagacccctttccattaagataacaaacagaacctagaaggcccgtagcatggtggcttagaacatgtgggccttggatgggatcctgccaaggggtgtgtgacctctccgaagcctccagggatgatactactccctggggtgcttatgccaaccacgttagagacaatggtttctgtacccattgcctggggctgccataataaagtgccacacactgagtggcttaaaacaacagaaacctattgtctcacacttcygggggccagaagtttgaaacccaggtgtgttaggatcctgctccctctgaaggctccagggaagagtgtcctctgctccctccgaaggctccagggaagggtctgtcctcttaggcttctggtggcttgcaggtgcagccctccaatcctcctccccaagcggcctgctgcctataaggacacgagtcatactggatgaggggcccactaattgatggcttctgtaaagtccccatctccaaataaggtcacattgtgaggtactgggagttaggactccaacatagcttctctggtggacacaattcaactcctaataacgtccacacaaccccaagcagggcctggcaccctgtgtgctctctggagagcggctgagtcaggctctggcagtgtctaggccatcggtgactgcagcccctggacggcatcgcccaccacaggccctggaggctgcccccacggccccctgacagggtctctgctggtctgggggtccctgactaggggagcggcaccaggaggggagagactcgcgctccgggctcagcgtagccgccccgagcaggaccgggattctcactaagcgggcgccgtcctacgacccccgcgcgctttcaggaccactcgggcacgtggcaggtcgcttgcacgcccgcggactatccctgtgacaggaaaaggtacgggccatttggcaaactaaggcacagagcctcaggcggaagctgggaaggcgccgcccggcttgtaccggccgaagggccatccgggtcaggcgcacagggcagcggcgctgccggaggacmagggccggcgtgccggcgtccagcgaggatgcgcagactgcctcaggcccggcgccgccgcacwgggcatgcgccgacccggtcgggcgggaacaccccgcccckcccgggctccgccccagctccgcccccgcgcgccccggccccgcccccgcgcgctctcttgcttttctcaggtcctcggctccgccccgctctagaccccgccccacgccgccatccccgtgcccctcggccccgcccccgcgccccggatatgctgggacagcccgcgcccctagaacgctttgcgtcccgacgcccgcaggtcctcgcggtgcgcaccgtttgcgacttggtgagtgtctgggtcgcctcgctcccggaagagtgcggagctctccctcgggacggtggcagcctcgagtggtcctgcaggcgccctcacttcgccgtcgggtgtggggccgccctgacccccacccatcccgggcgagctccaggtgcgccccaagtgcctcccaggtgttgcccagcctttccccgggcctggggttcctggactaggctgcgctgcagtgactgtggactggcgtgtggcgggggtcgtggcagcccctgccttacctctaggtgccagccccaggcccgggccccgggttcttcctacccttccatgctgccagctttccctccgccagctgctccaggaagcttccagaagcccctgcgcgggccttggcttgcagcaaccctttagcatacttaggcagagtcccatatttccttcctgctggaggccaagttctaggggccttctggttactatggctggtgtttgtgtacatcataccctaactgtattcatcaacacttagagtaagcaaggctcgctggagagccacacacactgggcaccgtaatgtcggttataacaccgcagaggagttctgaactatgtatttcgcactcctgggttcatcatctcctgaaatctcagggtggtgtttgctctcagttgcttcagctgagtagctggctttctgtcctggaaagcagactttgtacatgtgtgtgcaacctatgcctgctgagatcatcatcagacagggaagcggcttggtccagagagctgttctcagtagaatgttaagcacagagagctgagaattagactggttatttacatagacatccaaatagaaacctatagagtatctgttaagtcaggctctcccgtcatctcccccatccctgggcaggtgtcwaggagatggttttgttattttcagggccctctcaatggctaaaacactctgggagatgaacaagattttaaaaacccaaagcttagcgcacctggtgggtgggggtgtgaaaactttgaaggaaaccgcgtcaagagcctggctgattgttaatatcacgttaactcagagggccaggatacttgcccagacccggagtctgcctgcaagtagcagaggagagctggccttgctctgccgcgtgtctttcttcctgggccctctgtctcgggttggaatttgaatagtggagtagtgtctgccacagtcaggggcctggatgaagtagaccaccagtacggagctatactcaggtacttttcaatgtatatatcttcattaaaaaaaaaaaatctgggccaggcacagtgggtcacgcctgtaatctcagcactttgggaggccgaggtgggtggatcacctgaagtcaggagtttgagaccagcctggccaacatggtgaaacccmgtttctactaaaaacacaaaaattatccaggcgtggtggtgcatgctggtaatcccagttacttgggagactgaggcaggagaattgcttgaacctgggaggcggaggttgcagtgagccgagattgcgccattgcactccaacctgggcgacgagagtgaaactgtcctgaaggggaaacaaaaaaatctgtatcaaaataaggatttaactaatagtattaggcactactttaaaaaggctttgctgttagtaaggttgaaagaaatagagccctaggtatacattgggtagcaccttgttcagctgctcagattcttgaaccttgttgaggtcttactttgatatcacctgggccttacttttcgttgtttgggtttcctccccaggtgtctcaatcagggcctcctctgtccttttgcagggaagaagggggtaggaagggcctgaaaaagaacttgccttccccattgccccctcagagtttgttcctctccagtcctcttcccaccctttcttaggacaccaaaaccctgactctttcagtattttataataaaataaagttactaaattgtctgttctgttttgcagaggacacacatttaggagccagtgattcagaccttccatttttctttttggtgctaatgctcttttcagtatattctctttgatagaaaaaaaatggaggcaaaactgaattttctgcattatcttttcctttagcattattcttgtttytgcacttcattctgacccccttccccagcataaagttccatgtccagatccacttgccctgagatttttgacttccgtttgggactctagtccctccaggggacacattgagcctcccagaccctgcagggccctgtgctcattcggctcttgggctgttgctacggtccttcctgaccctctgtttcctgggacaagtagtttttaatgcagctactttctgaaagagctggggtcttaccgcagaatattattttattatttttagagacaaggtcttggtctttcgcccaggctggagtgcagtggtgagatyatagctccctgcagcctcaagctcctgggctcaagcgaacctcctgctttgacctcccaagtaccagggactacaggtgtgcgccaccatacctggctaattgttgttgttgttgtttttagaggccagggtctccgtatgttgcctagggtggtctcgaactcctggactcaagtgatcttccctcctaggcctcccaaagtgctggaattataggcatgagccaccatgcctggcctcgcaggatattatttaaacgaaacctgaaggatttaaaatcagagaagacacataaaccatcacctgactgtggggtgagagtggtctttatatagacactcatgatgcacaagccagcccttcgccccactcttgttttgaagtgaaaggatttatatgggagggmggaggtttgagctgtgcaggagggtccttggttggcatgaggattttgtgaacctaygctgttagctctgcaggcctgtcttggrcataggtaagtagaagttggagaccttgtgttgtggaccaaatgttgcaagatgtgtgttctgtggcttttcattaactgctgcatatctgctggttggtggacatagtctagttttcttttgacttaaaaaaattaacagtacagcttatatcggagggctgcatagtttgggggaaactaatgaatatagtatggaatgtaatgaatgactgacttcttcatagagctattgaagtgatttatgaagaggaagaaatcatttttgtgactttgttgatctttgaagtattagagtggctttggcaggtgtggatcacccggaaaggaatcaaacactgagtcctgccaaggtgctcggtcccrgcagcaaagccagtcctcagcagcctgcgctcccgaagctcctccagctaagtractgaataggccgccctgggagctgcccatgcggatgctctgaatgrtgaaacttggttttgacaccacaagttgttttcagttaaatcagtggctcagcagcagagcagggttctccaaggaggcctcgtgtccccttcaccccacctggaggtagctgttctaaaaccagtaaaaaattctacaaaaacattttcttagggttgttaaattagtcatagtgtgtgtaaccatgaaaggaatggtgagagtgcaataaatgcctggtgtgttcactctcctactcctaaaagtttcttggtagaataatttcctacctgtgatgcttgcgaagtcagcagagkctcccacccagccctgcsgcccattcccagaagtctgggctgggggacaccgaatggatagtccaccagcggcgtggcttgtgaaaggaggtacttgttaaatctatgtgtttttattatagacatcgttctgccagtcgcaataatgtgtttatggacatttttctgcaagcacagygcgggtggcagtttttactgacaaattgagtcatatgcrtagaggtttagaaagcgcttgccttattgacggatcaggcaattctggcacgggatgttcagagatatttaggtgggtgaagagagtgaatgaatctcagggcagagaaggagatggggcattatatgttgaaatgcaataaataatcgctagttatttatcatttgtttttaaacttttagctacattgtacttcccagtcaagaggactccggtgggcagccggggatatcatgttcaggtgtctytcctgcttgtgtggggtaagagccactactggaatgcgattccagcaaggcctgacgagtcacagccccttgaacctgttgctytccgtaaagtgggatcttcacaggcaacagtggaggagcgtttgagggtgacctgggccctctgcatcagaattactgtgggtgctggctagagaggtctctcgattgcagggccccatgggagacctacaggaccagaacctggggatgccaggggattctggcagaccctaatgcttgagcacctctagggaaggccttaggatcctctgggaagtagcactctccagcccaggcaagatccgagtcccccttccagaagkatccatcggcagttggcattgctgcaggttttctgtgcatatgggtctgagtacggttttgtaactcctgagagacgtgaatctyttcaaattgcaaacccaacatgttatyattgcttttgagttttcagttttgtggttatgacaagatgcagatgttaccaaaactttggcgtcagttttacaaacacacgcgaagcacgggcaacccgtatcatatttcaccccttctttccttttgagagggttgtcttgtttttaatccccctctgggtcaaggcattttcctggtctcaggtgagggtgcactttcagaggcacagctgaatacattttgtgggactgaattgagcttttctacaggaagtgccaggccgtgtgtgggagtgatgctgtttcctagctgggtccccctgggcaactcttagccctccaggcacctcctcatccattgggtggggacgattatgcttattcggtctacccgggtaagtataggcacacgagacagtaaatacatatttttttaaaagtaaaatttctatccactacatggatagaaattttaatttggagctgagtctcacggaaggatgaaacgagaagacggcgaagaaccatttcgagccctcgttttccccccagtccaatccgaatctgtattttgcagatctgcacacacccaagccctcactgggggcatgtgcacggtggtcagaagtgcaccttctgggaacagatsggcttccgtttggacctgctttacaagttacaatcctgtgcccttgagcagagttacttaaccttccaaggccagatttctccaaaagcagggccagggacagttcccatccagaaggaggcctggcgctggggaggcctgaatgaaggcggttggtgtttgcggatgcagagtcgctctgttttggtggaggcaggactggaggtcgggatcacttggccacatttgccacctctggtgcgtctgaggtcacagtgcattgtctgtgtgcagcataaggtagttccctattcatttactaggtccctgaagtccttttgtctgtaaagaggctactggctctgccacctgcttctgtcttttcacagtagacattctcgacgtggcagcattctaaaggttcaggtgtgccacatcggcctagagtgggcaggtgggcttcatgtgtgctcctaggggcacttggcagttgctgatagcccgagacactgggagccttgacattattcatctgttatattgaaagaacttcccaaaggacggacacaggatctgacacgatggcagtggccaggaaccagcagtgacaccagcatgtgacagtattttcccatgtgtgacggccgtttagatcacagcagtgaggggtaacgcaggtccgctgggtaaacttggtcaaaaatgggaagtctgcagcatttcgtgtgtttgtggaaatgggccttatttttatttggggtgtctccttaatctcctgtcatggttcagctcaccctggtggttattctgggcgtgctgcgcttgttgccttgtacagaccaacttaggaaaggctcaccaccaccccatgaaggagaaggcgctgtgagtgtctttattttgcatatgaggaacccgggcctcggagagtttgagtgacttgcacaggtctcctgggatagaggtagagttttgttttcaacccagatttatttgataaccaagtgcaggctyataaccacttgtgccaggctggctttgcaacgatgagcctgagaagctgttagaagtcctttaaggggcaagacagggtgtaaacagacacagacctgtttatgtagctaatgttttctgaacatcaatgtgaccaagtgttgtctttagcattgtgggaaaagcaattcgcccaagtgtattcctgcttgaaggcgttgagccgtagctgaggctgggtgcagtgaggacttggggatggcaaagctgtccctgcgtgtgccttgtgcctaccccgcaccccactagagagtggaacgaccagggcagtggggccagaggaaagatgggaggatgcagagggccagccatgtcccgggactgtgcacacgcttcaccatgtccctgcasgccagggacccatgcctgattccctctraaacatttgcgggactgtggctacyggtcaggtttctccaagtggcccaaggggtgggcattttgagcagagcagtgggactatggatgcgggtacatttggggacctggccatagttgaatttgagcagggtgtggcaagcatgtggggctggacaggaaggcagagctagccagtggggccagggcctgcggagcccaaatgctgcgctgggtgaagggccttgggagtcttktgagtggggaacactagcctgtcagtgcttcccagagaagatcacggggctggcaggggactgattggggcagaggatgcaggatggtggcagcaggcctggcagggcggggacagttccaggaggtatagctggggtcaaccctggtggcttctggtgagagcggagcaggtgggagtcgcagagtgtggttgtgagggactaagtttagaatcgcttttcttattgagagagacgaaagccttggtgtgtgtgctttttatgtgagggaagccagataaaggatctggctttggaagggtagacaggccgccctctgccctgcctggcatctgggttctgaggcgggagatttcccgactgcagccgcgttcaggcgaggatggcagcggtggacccaggctcattaccattgctcccaccccagcctgtccctgttgggggcaacctgtacgtcctgcaggagtcacggaattttaaaaaccaaaccgtcaggtgttagaggtacagtcacatcagaatgcaaattagaaatagtgtgtgctggggccttaaacaccatgacgtgtttcgtgggctggtgcggctgagtgtgcccctgggcagcagagattgacgagggtggctgggcttcctccgggccctgggctcgcagtggccttgtcttcaaggggctccccgtgtggtagggagacgtgcttgtcacayccatacattttgtaggtactggtgagggctggctagactgaatgaggtgaagagcctggcctttgttggggggggtgttggggagcttggtaagtggttgaagatgttgaagaagtcccctctgaggaggtggctttcgagtggagatttgaacagtgagaggtggcaaggtctggggaggaggcttccaggggacgagtgagagctgcaggtgcctagatggctgcaggtcggtgtgttggaagcacagatgggaggtcctatgagggtcacggggtggggtggggagcattgaggccactgttgcaggcctggattcactctaggagtgttaaagccagggtctcagcctcctgcagttgtcatctagttaaagtcatgccagcagggcagggctgtgtgtgtctgggtgatgggggatcagatgagaaagtgcgtgccaccctcagcacagtgcatgagaggcgtgaggcacggcggatgctgcgggtcttataaggcctttaaygctcgaggggaagttcctagaataatgggcgaagaaaaggaatgatatatttctaaaagttactgaatttagctagctagcccaagaaaagcccatgtgtgctattctttattgtgcagaaaaattcgtttctgtcaccattgtgttatcatcagattaagctgtcgagtcagatggatgctgtggttgtgcggggtgcgggccgatcagcacactcccagtgcctctgcaggccgtcagcctccagcccaggccagcctgagaggcaggcgacgtgggaagggaggggcttcccaccaggacacaggaggttgctgaggaggttgcttccatggtgccacttctgaaataagaactgttccttggaaggaatgcacaggttctgaagttagtgttcttaaagttcaacgttatctaccctcttggccatagttgaccaccctgtggtcatccttggcccagcaagagcacaggctcttggaaagccacaatccatgaccatattcacagstgaccaaccatttgccaggaggcaggactttctgtgctaaaatggggatgtcccaggcagactggggtgggtggtccctgcctccctcggctctcattccagggtcctcctggacatcactgctgtcactttgccactagcttgagtccacctgggccttgaggcagaagcagtcgttgaattttctttttttttggttctccggaagcatgggcttataagccttcctgttgtattttgccatgagtgtaattagaacatctcccagagcctgggtcacttccctttagctggacatggcccccgctgtccttgtcacattttttggattgtttgtcactccagaaagccttcagggtcatggttctcacttcctcagacatttttctcttytgggtgtgaggatcttttgctcataagacttgccttctttgggcctgagacgcttctcccccagctgtggagatcatgacagttgcagcagacggcttcttggaaaggtagaaggctctggtgttggctgaggagaagcagctccgtggtctccaggggtgtcctgggttcccaggaatcccatggctcctgggggaaccgctgcctggggcagtgctggttccatggtctgttggggttcctgggtgctcacactgccccagcttagccggcgtgactcaggatgctaggacccatcgccaggctgctgggagtggctgggtggggaggtcagctctggcaccaaggccatgctggggctgcagggcttggctggaaggggtgctgccctgtgtgtcctgctacaaggggccggggaccctcccaactcagggtgtcctgcacgcccacactgcctccctcttctatctttaagacacctgggaagcttctggacatgtcaaacccacaccagactgagtggcagggtccaccacaggagtagcttagtgaagaccagaaatggttttgagctgggcactggcacagacagggtgagagccagccgcatggtcctcgcagcctccccgcctgtggacccctctctcaggccaggcaagtctgtgggctcgtgggaccccggcagtgctggcctcctgtgtttgggcctctgcatctgtgctctgccctgaggttgggtgagtgggggactcgtgtccctctcttcccagagcagcctctgctctatcctcagggaacctcttctgacccgatccccacgcagacatgctctgctgccctctctctcaatcttccccactctcacttcttccagaagctacttcagcccccacgatctctctctgtctggggcccttcacacaccactgttttctactagacttgtattgtttccatctcttgatggtgggatgctagattggatgctctccaaggcctggtgtgtggtttctactggatggaaggcccagcacagagtgctggacacagggtgctgtggactgaaccgtgtccccaagattcacaggctgaagtcctgacctccaatttggctgtatttggagacagggcctttaggaggaaattaaggctaactgagtcataagagtgggatcctactctgctaggattgatggccttggcagagaaagagaggatcttttttcttagaagagaaagagaggatctctccctcccataccgtgtgaggacacagcgaggaggaggctgtgtgcaagccaggaaaggagccctcactggaaacggaatcagccaggaccagcagctctcacttgccagcctccagaaccgtgagaagataaatgtctgttggttaagcccccagtctggtattttgttacggcagcccaggcaaaccartatataggtgaattacagactaaagttgtttcaaaggcacaaaactcatcaagggattgtgtatgaagttggaatttggggctgaggataactttgtcatcagacagtgctccaaaaaggcactgttctcaggtttagctcttggcatcccaaaagatatgagtgtatygcagtaaaaaacaagtaacaaacagaaacccagatttcatgaccagaaacatcagtggttgtgggaataggggacagcaggcaagacaggagactccagaagccagcagaccatggaaaggcctggtgctgtcctggccctgggtgggcttgctctggtaagcggtagaggaacctgcgccctgatgggaaggagagaccrgctcaaatgctgccagactgggtttttaaaaccagtctctacaggttcattgggattctttttgttggttggttgatttttccccccctccagattggtcagtatacacacactaatccagcctggttcaaaggacagcatgtggtcgtctggttggacaccagctacatctctcagaaccatactctttgctgcttttcaggctaagatagctctctgagactgtttggaggtctctgttgatttaggggccttgcaagacatttcttgctgaaagccccgctggcccacacctcaccaaattggcttatgtggctactgatggggggacatagaaaaggtagatagaaaaggttaaatttacttctgtctaactcaccaattcatgctgtggattgtagatctgcaaaatatatcaagttcacagggattttatgattgttgcaaaggaaactcaaattgtcagcsttttcctgaaggatcttgccattcctaagctctggctatgcccctacttctggctggctgtggccttgcagtgcaggctggcactgtgcccctggcatctggctttggggggcycagctgtgcagggagcagatgctgtggtgaatacaggtgaagccagagtcctggcttggggaatgtgttctgcttcctgtagtgctctatttgaagtgtggatttcagttcttcgttatcttttatttatttatttayttattagcacagcttgtttgttgttcagttccatagtgagaatctctaagaatatgattaaccttgagggtcatcttatcctgtaattattaatgattgattctgtttatccttgaaatcaataagagaggcataatggtttggtctgtagttgggcgtgatttcttacatttcgtaaacacggttctgtgacagcagttgtatcagtttattacccagaacatgtttgatgaatctgaagtgtatgattagttttatataattattgtgatatgtagtgttccttacatgagttatgttaatatggcaaatagtgttaacatctcctgccactaatagttagggtggggacatataataattgatcttcctgggagtgctgtaatgtaaaaacaattcaggctgttggaagtatattttacaagtatgcgttgggccttggggatgttatattgaaaaacccaattgtacagttaccatgggaacccaattaaaatagattggttgatttttttttttgtctttcatcttgaccaaaaatctaatgtattttaaatgttttcatatggaattgtagtcatatactgacttgctgtgccaaagtattctgctcgttttttccaactttaagctaaaatagtgaaaagttctcgagtggatccttatgagaacgtctcccaaagagaatcagtcatgtttttgtggaaaagtttgtgtgagtgatgatggtagagtggaggtggtggaaagcttttatgaaaaaagggagaacaagcattttcctacgagggcagacaagaaccctcatgttcttcctttggtggaggacatgagtgtgtttctccgttctcacgtttgtagaaggtgagattaggtccctaaagggccctctccgtgttgtggaggggttggggtgggggtggagtggtggggtgggatctgtgtttgccctccttgctgggggtcctcacattgtttggtctcagagcctttttgcacagttaaaacttatgagggatcccaaagagattacctgagttatatattaataccccattagaaattagcagtgagaaattttaaaatattgattcatttagacaataaacctattagctttttgcataaataacattttaaaataaaaactagctatattttccataaaaaccaattagggaggaatgttatcagtttccattttttaaaacttcataatgcctggatgaatagaagacagctagcttctcctgcttcattcagtctgttktgatatgtttgggttgaagcgcatcaagagaatctggcctcactcaggtaagtaattaaaagggaatagtgttttaacagcttcctcagataattgaggatgttctcctttgacactacatcaggactcggcaagtggtaatttcctgagggtttgtagcagggtgcaatccgagacccgctctgtgaactttttgctctctatgacgttaaaatccacaggtatgccttgcactttgagtgattttgtagcgtctttcatcggccctgtggaaaatgttgcttcattgagttatacagatctttcaaatattgatgtttcctaatacagtcctaaaaataatatttgttaatatcaccacctttctccttaggaaagtcatttagtattgggaagccatggtggtgggtaccagtattctaacattttaatcatcacttgaaagttctggctgggcacactggctcatgactgtgattccagcactttgggaggctgaggtgggaggatcacttgaggccaggagttggagaccagcctgggcaatayagcaagatcccgtctctacaaaaacattttttaaaaagaaagttccccttttatcatcagcagcagatactgtcagttgtgttcattacaggtacagactattcatttttgagaaaacatccgccagatatgcaagtctgaataactgttgtttgtgagtcattcacactagcaaagcttttgttctaaaatgaagttggtaagttcatcagcagtctctgccatttgcggagccctcctggtggcagcgtcattctggtttgtggcagaagtgctttgctgcgcttcccgttaggtcacagaatgtttagaaggtcaagatttagtgaagtttgattgcttcctcagggcattctgaagtgaacctgcctgttgccctgaccgtgccttcctcctagagtttggtgtcaatatcttggcccttgcggaggcatccacggttttccccagcatggcttctgtgtygtctttcaccgtgcggtgtgtggtcagccatagtttgtgcaggtgccctttagcagatgggggatgttttactcttttctgcagtgaatatggtggataactctcattggtttccatgtcttcaaccaattttgtgttcctggataaatgcccacctggacttggtgaattactgttttcatagattgctggatttgacgtgtggatatgtttgaggattgtgtgtctgttcatgagaggtgttggtcagcagcattcctggagtgtctgtctgctttgttaggagggcaatcttgcactcataaaatgaggcctcttctatattttggattagtttgtgtaccgttagcattgtctcttctttaartgcttcataagatttaccagtgaagccatttgtgtttgaagttttctttgtgaaaataacattaactatgaattcagttttttttagtagctatagggccattcaggtcatttatttcttcttgagtgactttttgggattttgtatttgtcaaggaatttgaccatttcatctaagtttgttgaatttattggcctaaagttatttttatattcctttattatccttttaatgtctgtgggattttgagtcatgtccttatttttattcctgatattggtaatttgcactttgtccccttttttgctaactggtctggctagaggtttatctgtttcttttcagagarccaactttcgttacttgatttttctctcttactgatttctcctgtttattattgctttcttgtgcttactttcagtttagtttgctttcttttttgtagtttcttagggtagaggcttagatcatttggttttcctttyttyttttctcatataaacatttaatgctaaaaattctctctaagcactgctttaggtgtgctcacagatagacatgctgtgttttcattttgattcagagtggcgtatttcccaattttccttgtggtttcttctttaatgcttgggttatttattagtacatcatttaatttccaagaatttggggatttaaaaaatatttgggtactttcccagtatttttctgttattgatctgcaggggtgagttaccttgtaatcagaggacatacctgttatgattttaatcctcctagatttgttgagagttgttttacagcccagaatatggtctaccttggtggatgtttgaaaartgtatactctgtggttcttgggtggagtgctctttaaatgtagttgggtaaggtttgttgataatgctcttcaagccttctatatccttattgaattttgtttccctmttctaaaaattattaggagtattgacatctccagctatgattggagacttattacccctttcagttctgttggttcttggttcatctgttctaagtgatttcattaggtgcatacatgtttagaattttaacatcctcatggggaattaacctttactcttatgaaatggccttctctagttttgttgtcatattccttttttgaaattatttgatattaggatagccactccagctttcttttgattagtgtttctgtggtaactgtttttccattcttttatgttgaacctgttcttgtcattacatttaatgtgtgtttcttgtagamaacacagttgggtctcttgctttaaaaaatctaatctgacartgtctttgtaaaattggagtatttagaccatttacatttaatgtaattattaatatggttgggtttaagtataccatctggctgttcatttgtcattcaccaatttgttctttttgcccttcctccatcttccgtagcttcttttcagttatttggatatgtttttgaatgattccaatttaacattctgtctacactgttggcttgttagctatctctcttcttttttagtggctgctttaggatgtgtaatgtwcatacttagcttatgcttatcataatctgcattcatgtgatataatacaacttcacatgcagaataagcaccttaacaaaagtatgcttcaatttctctcatcccattttttgttatattattgctacatatgtaatattctccaatatatagagttactatttttatgttgggcaatcagttttcttttaaagagatttaaaaaatccagaatttacatttatttgcatatttactgttttttgaaatcctcattcctttgtgtagatcctagtttccattgagtaccattttttttacacctgaaaaccttgtaccatcatttctcaagtgcaggtctgctggtgtctgaattgtcatgcatttgtttttgttttttgaaaaaagcctttgtctcacctgcattcttgaaaaaatgtgaattctaggttgacctgtttttttgctttttaatactttaaagatgttgttccattgtgttctgccttgcatagtttctgatgatcagtttgccgtcattcttaaatttgttcttctgtatgtaatctggcatttttgccacctctggccactaaggttttctctttgtcacttgttttcagctgtttgattatttgtttttatgtttcttctgcttgggtttcactgagcttcttgcatctgtgagaatgggttacatatcccttatctgaaatggttgggactagaagtgtttctgattttggattttttttggattttggaatatttgcatagatagataggtagataaatagatatatagatagatagatatagatatagataccttggggatgtgacccaagtttaaacatggaatttttgtttcacatataccttatccacatagcctgcaggaaatcttatgtattattttaaataattttgtgcatgttacaaaattttgactgtatttcaactgagacctgtcatacaaggtcaggtgtggaattttccaattgtggcattgtgttggtgcagtttttgggttttggagcattttggattaggtgtgctcaaccttgttttacctcatatagatttttcatcagatttgaggaaatgtcactgaatatttcttcagatatttttcctgcctcccctttttctgaggctccaattgcgcatgtgctgcttcatactgtcctgtgtctccctgagccctgctcatttcctcagtctttttgtgtttctgtgccttgatagtttaaaaaacgttattttctcattgttgctattttttccttctgctgcatctaatctgtacatcctatcgattgtattttttactttagagactgcattttacatctctatatgctccatatgggccttttaaaatatcttctatttctcatgtcatatgtgggttctcctctatcttctcaaatatggagcatgtttataagaactgtttttatgtcccagtccccttgttttacgcatctctacttttctgggtttggttctgttgaatgatttttctcctgattgtgggttatatccctctgcttctcatgtgtgtgtgttttaaatgggatcctagacattgagagttttgttgtggagtgctagattatgttgtcttttaaaaaacagttttggactttgttctgctgcaggttcagtttcttgaaattgtttgtatcctttcaaggtatcatgctttttttaaaaaaaggttttgttagggcaggtccagaccaggttttagtccagggatagtttagtcctactatttacataatgtctttactttataagggtgtgtgtatgtgtatatatgtatgtgtgtgtgtattatatatatgtatgtgtgtattttatatatgtgtgtattaaatatatatgtattacatatatatgtatatatatgaaaaataaggcagctctgaggtctttacctgatgaatgttgtattaggagatctttccacactggctggtgagaacatgaaatattcccagctctgtctgtgatcaggaattatttgggctgctacttctgggcatctttctttgacctcagggagttccttctcaagcagtgtctcagtagttaggcagaggccacagggactcttctggagatgcctggygtgttctctgagtaggcccttcttccctggtactccatcctgatgattctaggtgttttgttctttttgaattctaatctctytccccactttggtgagagcacccactggttttgtgycagatgaccctcctcctccttggcacagcctggaggctgcatccagccgttctctggcggctggctcacttcacttccctttccttggggagcatagcccctggctgctgttgtccttgttctgaagaccattgttttatataaaagttgagcacccctaattcaaaatctgaaatgctacagcatctgaaaatttttgaacattgacatgctgctcaaagctgatgctcaaaggaaatgcttattggagcattttggatttttggattagggatgctccaactgtaagtatttgcaaatattcccaaatccagaaaaatctaaaacctgaagcacttctggttcccagaatttcaggctactcatcctggactttatttcgttttagctgttacatgtggttcttgctgcyctgtcatggctaraagtgggatccccaccaagttattagtggastcataaaaataaaagagaggcctgctgggctgttascagactgagattgctcagattacacaaagccctctggccctgaccccagactttttaccrgcctgaagtgggtgaaaagaaagcttcactgactgctttctaggcatgtttaagcctgcttattctggccctcacagaataagaattcaaaggacaataattttcaagaagacttaatttaagttcatctaccttattagacttgatatagatagatagsctttttaatttttttttctcatggaaacagagttgaagaaaactaatttaccttctaaatttaggcacagctaaccaagtcaaggtgtggttctgttcttctctgttctcttctcttctcttttttttttttttttttggtggggggtagacagagtcttgctctgttgctcaggctggagtgcgatggcatgatcttggctcgctgtgacctctgtctcctgggtttaagcaattctcctgccttagcctcccaagtagctgggattacaggtgcccatcaccacgcctggctaattttttgcatttttagtagagatggggttttgccacgttggccaggctattctcgaactcttgacctcaggtgatccacccgcctcagcctccagaagtgctgggattacaggtgtgagccactgcgcccagccggttattgtattttctgtatgctttttggtcgttcagctcatactcagtctttccctgtactgtttgagaaattcacaagtgaatcccagatcacaggtgtttggtgaaattggtataaaccttaactgactttctgttaagaaacataaaaaaatttatttgtatttctactctgaagaaggactgttcaaactttatatggaggggacccaagattgggaaggcagaggaaacaaagggcgtctttgattcacattatttttctcttgtcatcattgcaggcttaagtgtgtgtcatcactagaaatgtattctgttgatgtctgtcatttcagcattttcatgttgtcaaaaatgagaccagacagaagaagagtgtattctttcctgctagaactcrcacaacactgtcattaatgcctctggcagtcaggactttaatcagttaaatgtaatagtggtgataacgttaaagccttgtatggcagtctacccgggcagcctagagagccctgtgcaactctgcatttgaaaaatcaatcaactagggctgtcttttgtcctgggctacttggatagctggtatgaaccacccagcactagcctcctgcttgttgagatgacacttttcctgaagccatgcccactcttgacaaagaataattaggtgccctgcataagtgtatggggacctgcaggtggcttggatggtttgccctgctctcatgggggtccacatgagcatacagaatggaagaagtcatgatggttgcagtggttcctcagaggaacagtgagtttttcaagtaggactctgattatctgtaaaggccaaacttgttccagtgacatcacatctctggggttgctaggaagtaaaggagaaaatgggttcacttgcacagttttggattacatgtaagttttaaagaataggaatgtgtgtgtgtatgtatggtatatacrctatattatcattaccaaaaatgatgcctcctatagacttttggtagaaaggaaatttcyttctcttctggttgtctgaattttgttttcctttttttttgcttccctccggaagggaatcaaaaaattgtatatatatatgtacacacactatatatgaaatgcctgttcatatcctttctgcctgtgtttctgttgggatttctttttcttattgatttataggattattttatatagtctggattctaatcctttgtcaggtatattggctgcaattttcttctcccagtttgtggcctgcattttcattttctttatacactgctaaccatgtaggtgtatgtatgtatatattctgattgtgggttatatttctttgcttcttatgtgtgtgttttaagttggatcctagacattgagagactgtgtgtgtgtatatatataccatataggggtgtgtgtgtgtgtgtgtgtgtgtatatatatacacacacaaacacacataggtgtatacgcaggtatacacacacacacacacataggtatacacacacacacacacacacacacacacacacacacatgaatatacctatatggttagtagtgggaagccaagctgtttctcactgtcagatggttaagttttgaaattttctctcattctactcaagggtagaatgattggagtgtcagtgttcaatgctacaggacaataacttttgtaaaaatggttaaagcagattagaccccagtcagttaatccacctcctcaccaaaacttggagttatcatgctactaacactgctaacctactgggtaaaaatcctgtctcatagtgatcttaattagcacttccgattgagagcaaccttcagcatcttttcgtgttgccattcatcttttgcgaaatgcctgttcataccctttctgcccatatttctgttggattttctttttgttattaacttataggattatcttatatagtctgaattctaatcctttgtctgttatatgtgctgcaattgtcttctcccagtttgtggccatgttttcattctctttatagtgccttttgatggacaggagtttctaattttaatatagttgcatgtaattgaatttatgattcttttcctttatagtttgcacattttgtgtctcgtttcaaagtgcttccttatccccagtcataacaattccactattttcctatgaaagtatcagttttccttttcatatacaagtctgcagctcatttgaaattaacttctgctgtggtatggagtggaagttcagttcttttttaatatgaataatcagtggctccagccccatgtatagagtaaccccacctttctccagggctctgcagcggcttcactgcaaatatakgacaaacatgtgacatgtggatatagagcaagagaggcactgcagagccctagagaaatgaggagagacacagtaartggtgctggagctgctgactattccaagtggacgcatgcctttttctaggctctcctgttccattgatctttttgtctttctgtactaacgccacaatgcattaattactatagctttaggctaactcttaaaattgatgagtcagccaggcacagtggctcatgcctgtaatcccagcactttgggagactgaggtgggcagatcatgagttcaggagtttgagaccagtctagccaacatagtgaaaccccatctttactaaaaatagaaaaaattagctgggtgtggtggtgtgtgcctgtaatcccagttactcrggaggctgagacaggggaattgcatgaacccgggaagcggaggttgcagtgagctgagatagcgccattgcactccagcctgggtgacagtgcaggactctgtctcaaaaaaaaaaaaaaaaaaaaaaaaaaattggtgagtaaatcctcatatcttgattttccattttcctcttcaggagtttcttgattcttttggggcctttgctcatccattcgcatttcacaatgagcttgtcacattcttagactaacctgtttggtattttgattgacgtccttgggtctgtagactaatgtggggagaataagatctttaggatatgaatctgcctcttcaggaatatgcgctcttgcactctctktctctcttggatttccttaatgtctctcacattttaataagttttttcataaacagcttgtgcaccttttgaaatactccccgtgtccttattttttgttgttgccattaatattataaatggtatctttttctaggattagatttttctttatgactgatatgcggaaatgctattaattttcatgtcatctttaatttactttctaattttttaaaatgaatataccacatatatattctttgttttttctacatagacagagttttgcttctttccttctactctgtaaaccatttctttcttttacttgtcatattgcactaggatctccagttccattttaagtcgatgtggggataatacactcatcttgttgcttattttaaagggaaaactgctaactcttcattaacaaaaatgatgcttgctatagacttttggtagaaagaactttccttctcttctggttatctgaattttgttttcttttttttcttttttcttattttgcttccctccaggagggaaacaaaaaattgtcagaaactatttcagagctgaagaaaacttcttaatctccttctcctctactgttccttgaaaactttttaaaaattatgaacaggcttcaaattttattaagtgatttttctgcatctatttaactgtttatgtggttcccatccccatatctgttagtgtggatcatgacttctagggaattattaatgttaagctatctttgcattcctgggatgaacattacttggccactaagaatcatcctttaaacacctgctctagaccaagcttattaatttattgcttttaactttggccaaactagtggtttaattgtttttaaggttatttattctttattgttattgttataagattattcttttttaaaaactggttaggttaattatatgaagctatatttttgcacagtctatctttttctaccctttagctttcagcctttgktcttatatttaaaatatgtgtaaagtaatatagttttaaaaatatccagtttggtagtctttattttttaattatttagtccagtcacattaaaataattatagttgagcttacttttaccatcttgctatctgtcttctatttgtcccatctttatttgttcctgtatttctaatttattttgctttctttatgattaatagtttttaaawccatttttctcccctttctggttatacagatttgtatgtttcatttagtgattagcctagagattataatatacaccctggacttactatagttcacctaaattgctactttgccacttcctgaatagtaaaatactttacaaaatgttagtcatttccctttctcccagcttggatgctgttgtattttaattatatatacacatttaaaatgcagtagtcacttttgtcactgtttaaacgtttggtgtttgtgtcaccgtgccccatgcttgccctccagtgctctccattggttctccatcatcatgccttcgtctggggtgacttctgcttgaaggacttgtttgtttacttagtttttaatgctagtcaactggcagtgaattggtccatttttaaacactaatagttattgattgttgagttagcaattctttaccttataaaatatgacattccatcgtcttctggtttctgaagtttgctgaaaagtcagctgtcagtcttattgttgcacttttgaagataatgcaaatgtttttactctggctgcttttaagattttttctttggtttgaagctaattgtgttatggttctttgaggttttcttcatatttattctgcttagggtttgctraacttcttgaatttctggattgctctctgtcatctattggcaaattcttgaccctgatcccttcaaatattgctctgcctcatccaatctgtcctttcctctcggagttgaattataggtaggttagtccttttgactgtccctcggatctctattcttgttttctttccattcctttcccctttcttgaccacagtttggatattttctgctgagctctctggcagatcacggaccttgttttctgatgtgtccagtctgttactaaacccatccaatgaatcctgaattacaaattttgtatttttcagttctagaatgcccgttttgtactttaatatatattttaattctatatttaaaattcttctctttcccacttatgttgtctgtcttttcctcttattattaagtgtatccattgtaattattttacacttcttatctgctagcaccagtattgtggacatctattcctctgcttgtattttcttcttttttcccttctctttattattattaaatacatgtttttgctttttgcatgcttttaaaattgtgagtgtttgctggacttgtgcataaaggactgtaaaacctctggattgtcgtgtttttcatcaaagcaaaagctctctttgcccttggttaggcatatggagtgaggggtgaaggaccttggtttcatgagggattgatctgggtcagggctggcctgttattttactaaaactcagtccctagttggaccttccctttgagcatggtcttttgattggaagcccatggtctctttctcctcagcctgtaaatgctttgggagatcccttggttctccccttagaaggttttgagctgagctctttagcttcccacgtcccctgtttcaaagtctcctaaatgtcctgatgggagatgtgactatgtgtgaagcaggcccttctctctctgtctttccgcctacctttcctcccaccccagtctcgtaagtgctattagattaagggatagtgtgcttttccttttaggagccctcacttgacccagctctctaggctcatgaacgcagccccataggatagcaaattgattgcacttttggggttctgattctgatctttcatgccatccccaatgggccacccagagcttccctggtttcccttcccaggtggagtggctttgtgtggactgccacggtgctccccatctgcacccaggatcagcaagtgtttctgggcagcaaagggcagtctccactgtacagtcccagtccccctagtcctggttgcttccacagctctataacattttaaaagacgagttttgtaatttttctgactttttccagttcctgtgggaacattgggctgcctccattagttcgttttgcttggaaatgaaagtccattctgagcacttgcttgaaatcttgattgaagtctttgatttctgctttctccttggtcatgctttctcctgtcatctatcttcctttgcccacacatttcataaatgcttatttcgtattctacacaggttgctttaaatatctgcaatcctgtgggtggagtgtgggctttgtggttttcatctttctgtgatttcttgtaactcttacgatgacacgggaccttgtttgatgacttggttgattattaatttatatgggctgagcctgatctgtttgactcctgagtgcctaaattagggatgcttttccctaagggtgggtgtttgggtttctgttgcctggaaccagggggtctcaaggcagcaccactcagatctaggactttctaaggcttctcactcaatcagggccctcgggttgtcagggaggccccagtggagcgtctggaggtcatgaggtgtgcaccttctctgctsatgctgcccactttccctctgcttcctccagccctggcttactctcctttttccaagtgccccgattctcttyggattgcccctgcttactagagaggccattcaggaaactttgaaacattgccatttattcaatatctagtgcatcgtagtcccttaatccaaaacaactggtttggtttttgcataaagctaccagaagataaatatagataaaaatcttgaagatttagaaaaagtaatattaaaatagatccttagatatgttcttatcaacatctgcaagtgttcatcccaatatggattccatcagttagaggggttttaagaggggtcactgtgcgccaggcccagtgtgggatctgggggaggttgtcaaagttgtcttctaatccagaacaacttgctcactaatatttatatttctgccttcaatctgggaagcagcccttttcagaaaggtttgctgcaatactctctaggggacaaagctgagtgaaactctagaggcttgtcttatacgcatagacatcacgtgcacacttayaccccagtcatttcygcatgtgggatcatcacagttgtgtgtttgactttttcacctgaccttgtaagtgcttagccatataytgaactctttaatatcatttttggagatggcatagtgtcctactgtaaagatataaccttcttccattgttaggaatttagggcaatttcatatctgagactctgtcttaaagaattaattaaaattttgtgcacaaagatgtttaatatagtgttttgagaagtcaaaacacagggaagacttcttgtgtcttacaytgagaaattcttagccagcctcttagtttcctgaattcaggactgtgttgtgtaattttgaagccccaatagtgatatggtcatttttttcatatcttcattcaaaaaacctcagtcacctggggagtgggtggggtgtgtgctggaccctgaccttgaactgtccagacaagttcctaaccacgtggagctcaagcttccctggggcttacctgaatgacctgctcagtggccagccacttgctgcgtgtcagccggtgaactctgggttcctggcttatcagagacttcaagtcctcattaccttctgggtctcagtttccctaatatgtgcaatgacaggattggccagggctttccaacagaagtttttgcaatgatggaaatgttctgtgtctctgctgcccaatgtggtagccactagtcacattggctgctgggcacttgaaattgactcctgtggcttagaaactgaattttaaattttattacattccaattaatttaaatttaaataagtagccacatgtggctaacagctgcgtatggacactgccagtctagacggatatgatgcttgtttaatgktcttaagaggtctttagagtctattctaatcctgacatctggttttctttgcttgtttgtatttatttgttcctttatttttaccacgactgctctgagtaccaggaactcctttttggratgtcacagatcaccaacttccttctctgtgctgtgtcaatagggacgtcacccctgtggggaaaggaatttgcctgaacaaracactaaaaagataaaataggctgaagcggagaagaataaaagattgtgctggcatgagctagttttgcaaaacccatttaaataaactcaggatattaccgaccccatgcacacattctttccttgactctgcaatgttccgttaaaccagattgtgaatttttttcaggattaacaatttacatttatgattctattttcttttataagtaactgctatttgtaaatgagactaattatttgaattcrtggtacaaataacgtaatttagagttacagaactcttgatcctctgggtctaagcaaaataaacgtagtacctaatgctggaatagagcaagagttttctttgaatctcaraatatctgcattgtgaaactgggttaagttattttggaaactataaatagtcacttkgtaattaggtgtttggttttatttgttctaatggagtgcttattacagtcggtgcatttttaccccacggatcagaagcttttataggccaagtgatgagagaccatcttctacatttcatttgctgattgtgactcatcactgatgatcgatggactgctgaactttttaattcctgtttgcttgtagagaaagaaaattctcatctcttttgataggtcctactccaaaattctgcagccgttttgtacaatcataaccttacacgatatcacacaaaggcagagaaacgattgcatggacatgccttcctgtcaaacgtgtatggaatctggcccgtcctaggcttatctctttccaccaggattcttcttcccatttttctcagcagagcatcttcacgtagttcacatgacaycagaacttcatcaggatgtaagttcctgcagaaataggcctgtgtctggtcagtaaacagagaatgtaatgacattcccagagcattcacaggccagagtctggtgtcctccccagcgtccagcaggctgcggatggatggcatgcagctgacaagattgatactgcattagacattcctggaggtccctgcggctggggactggcactcgcaggcctccccctgcacacagctgtctttggagagcacagagcaatgggaggcggttttgttttactatttgccatttagagtctcacttttaatttatcctcactctttaagaaataattggtaatttatttcttagagatcaaatgttgctacaagctgaaaactgttttataaatatttcaggaaacttgaatgcctggaattttcatcgtcacgcttaagtcttcctccaaaaggggatggacttcgttccatcccgctccaaaagctggtccgattcttgcctgggtgttgtatgctatttgccttttccataggctccaataacaataagtacatcttaaaattgatgaaagtttaatgaatggctagcaagcagagagactacttttataacaagattaataccttggctcaggggacataacattttagtaaaatcaaaatttgtatagttatcctagcggtgcttgcaacctctggcttccatataaaaatgtctaaataaaatactggcagccgtctctagccattatttccatctgctctrggtggcctgacccggaacccactcagggtggtgcactctgggccggggtctctgggatttctgtcgcatcagcttgtgcagccgtggaatggggatggggcactgaggctagctgtcccgtgctctagaggttcctgggaaaaaaatacagagagaaataactcacaagggagccagcatttggtgttgttttaaataaattcattcatcatctataccttttccccttttaattactacactttaaaagggatcttggtatatatttatttttgttttgttawtttttttcttttttaaaaaattaattgtagagatggggtctctctacattgcacaggctcgccttgaactcctggcctcaagtgatccgcctacctcagcctcccaaagtgctggggttacaggcatgacccactgtgcctggccagttttttttccccctttttggcaagggaaggctatcggggtagaagttctgaagcaagtactctgaatggtttctgattttaatagggggagcatcatttcctgatctaatttataatgtgatataaagctgctggccagctgacactaatcttaatttatgatctatttaacctttatatttcctagccacagctcgtaccactcccccgtctctgcaccagcatgtttcagaggcaggcaagcagcatcagttctggatcctggaggcaaggggagggttttcacggaggggcggtgcacagctctgtgcctccccggtcagctggtccggcactgcagtcagcagcaagggcgtggtgagggccctgcagattcttcacactgtcctggtcctctctcctgtttctgaatggcaggactttggggtcagattagaccctgcatgtacatagatgacaacggaatggctttttggggggactttttattttgagataaattttagacttgctgaaaagttgcacaaatagcacaaagtttctgtatgcagccaccatctggtttctgcyagcactaacacctcacacttascacaaccagggcgctaacacgggtgcactactgtaaaccttgccatctctcctttgtctcctctagtgcaatggtctgaatttatgcttcctccaaattcctgtgttgaaactctacccccatggtgatggcctttggaggtggggcctttgggcaatgactaggtcaggctggagccctcagaatgggattagtgtgcctataaaagaggactgagggagctcactgtcctcttccaccacgtgaggacgcggcgagaaggtgctctctgtgaaccaggaagagggcccttatcagacacgggctctggcggcaccttgatcttggacttcacagcctccagaatgtgcragatgaatttctgttgtttacaaagcacccagtctaaggtattttattccagcaaccagaaggaactaagacgtctaacttgtgacagttcctcttgccttgttttttgtgaccctggaccctttcgaagaatactggtcaggtattttgtaggatgcctctcgtttgggtttgctgatgttgtctcacagagagacagaggttacgtgtttttggtaagaaggctcagaagtgatgtgcccccttgggccatcctgtcctggggacatatgtctgtcagttactgtgatgttagcttggtcactgggtatggtgaatctcttgtgcatttcctcttggtaattgaagttttcccattggtaattaataccttgggggagatattttgagaccattttggttctgctcaggctttcacccactcatcttagtgaccgtgggtgtgtcttgcctgtggcagttattactgtactgtttccctaatgtttgtatttccctccttcccttttcatttaccaacgggaactgttctgtaaggaagagctgtcttttctttcccttttatttattagtcattgaattattcacatcagcgtagactcatggatatttattttaatttctggggtatagtccagtgctgtctttacttaattttgttactcaaatagcccccagtttggctttttggaaactcttgggtttggctcctatgtcttttggacctgcccatcgtttttctagcgctttcctactttctgggatcatagtatgatccaggtgtatcttgtgttttccctgccccagccctggattcagtcacttctccaaggagcctctcttccttttagctggaggatgatgtttagcagccaagatctgggtgctgagtgtgcttgctgctgctgagtcactgctcttcctgcccttctcagtagggggagctaggggctgtatgtgtgtctactgacccgtgcatctgcatttatttctgtgtctgctgtctgcatgcatgttaaaaactgcaagttcatctgatgcctctaacttgaattcatcacagcaggttttattctaatctctgcctttcctctttgtagctgccttctccaacattgagaaacctggccctctttatctgcaacatgtttgcttatatggtggcttcctttaaaaagaatctggtaaaacctgtgtcattgtgtttcagccactagatgcagatgaggcttagtaggaaaagccctacttgtgaagaacagtatttcctatgcttgcttggtggaaaaagtcacagaattttctatagaattctctgtaaacatggttaggaatatagggttgacatttggactcaaatagaaaatgaaatccttttgtttcattacttatttcgttactcagctttcaccttgactcttggaaaactgatggcatgtttccaaatggatatgccagctaattagcttatttctcaaatatccatgttggatgtggaaaacaaataaaaataaagcaaggaagaccctctactgttgttatgtgaagaataacaattacctttaatagcattttctgctaatttagagatttttctttttcttacacttattttctaactcctatgatttgtgtaattcatatcttatacctacatctgattcattatgattcttaattctctttgttgtaaacagaaatattgaaaattcattcgatgaacctaaaaccctttaaaaggtctggttaaattttaacattaagggtgatacagtattcatgctatagaacacagacagtcagaaatcttatgaagtgttggagactttaatggatactgtactatgtagaatctgatcacgagactcctgcttcatcacgtttttactcgaattgggtttcctggtgacaaaagactgtgaagtagctgacggaaatacatccttatgtcagttttcacccgatgactgaaaattgttggatatatgcgtgaaataattaggtcttatttttggaagggagagaatataaccgactgaaaaataatttggagttaattgtcctgaaaattcacctactgtatattaataggttaggtgtttcctaattctttctttcttaagcatatcttccttttccttacactctttttgacacaaacttttgaatatggactcacattataaatcttgggattggaaaggccataaagattggatttttaaaacttcaacaatgtagaggaataccagtgttgtatttgttcagaaagtcctcattggcgctgatttgggcaccgcctggtttcctaccgtagaagcgtgtgctgtggtggggtgaactgggcgggggattcacacyagcctgggccctgggccatggggggctgcctcccagggctgcttcagccgacaggagggtgcggtggtgaagaggcagggctctggggattggaatctccacgcttgactttaggcttctactgctcactcgaaatgggacctgaggcaaattattcacctgcattgtgctgggttcctcacctgtgatacatggattataatatcatctctcttcatgggttattgtaaggattgattttattaatatttcgaatgttaacgttattatttatttattttgagatagagtctggctctgttgcccaggtgcagtggtgcgatctcagctcactgtaacctccacctcctgagcaatcctcgcacctcagcctcctgagtatctgggattacaggtacccaccaccacaccttcctgatttttgtatgtttttgtagagacagtgcttcaccatgttgcccagactggtcttaaacttctgagctcaaactatccgcccgccttagcctcccacagtgctgggattacagacatgagccaccgcacgcagcccaaatgttaagtgtatgacataaaattcagggttactttgcctaaacagttcagtgtctctgattaatgtgatttctgtttcactgacagctttcatgtaaatttaaaactagatagaattacagagcttcagagttgtacagacttgtagaggtaaagtaaagccaaaacattgagctcagtgacggggtcagtcacttcctggtgtcagagtccactgacaggctctggcaactcttgcatcaaaatcctttgcacacaggtcctttcttgctcttagccagtagcagctgtcctgggcagagttccctcagtgaacctggaaacggcagtggctggaggtgagaggtgtccatgtactcacttgttcaaagttgccccctcttccctctctgggcttgggccctgatacctctcagagctaccctgcctcctgcgggggtgggggaggatgcctttattatctctaggccaaaggttggacctccacatatgtccatgatgagggacagcagtcatccctttcaagaccragaaagtatttaactccttggaaaattgagggtttattttgcagtggtttggaaaaygtgctgagggtggctgtagagttaactaaatagaatgtttcagagtcacagagatttgtaattggtgggcttggtttgtttttatagtgcttactcctttttatctgccttgtggatttatgcatttatttgataagtcagtcatttacctccccattctttggttttcatgtttctgtttatcatcaagataagcaactgtgggttttcttccatcgaagcacctgcygcaggtgatgattttaatggtatgactgccatggtcaccacgaccattccgaggactctaaacatgtttcttgtccaacactactttaatttgaaacaaagcctgaattgagcagcattcgtgtctgtggtagaccagggaggcagggctcacctctgttttcagttcccctttgctggatgtgcaggaggactgccccgttccactccttcaagggtggcttggtcatggacttggtttggctaatgagcgtggsctggagtggcatgtggtgcttcttggtagatgtgtgtgcacaccagctcttggttctccccatgtgatactgggacagctgtgggatgggatgggcgcagcctgtggcatcaagcttgcatgaatcaaggccgctgctggggctagcccagacccgtagtgggtttggtggtggttgttactgcagagcgtcccagccatcctgactagtacagcgtggagtgtgtctatgtcctggagcttggggagagtcctggccgcagtccaggctttgaagaatgttgacttgacctggaatacccacctgtccctggagtgctgtgttcttaggctagttccgtaacctccctgtctgcttcttcatctacacaccatttgatcttccttaggtttgctgtaaggagtaaatgagataacgcatgtaaagcacctggcccggtgccaggcatatttagttaatacgttgcgttcctacccagctagaccttttaacagtccattggcatcaggtcacctacaaaaaggtacagaagctgcctttctctgtggtatttgctttttgattaaaaaaaggaaataaatgatcacataattgttttattttgccttaaaaaatgagtaaaaaaaaaatgtggctcacatatgccagaggtgtgatatgtgagtcgtctctccctgaggaaggctgcagctgaggttgggggtgaattttttcccctgcatgaagaggggtgactggggatggggccrcctcccttcctaaatttccgtgctccctgttggtgtaattaacttaggggaaaccacacgtggggattcaggggcttctccctttattcttttccttaaaatcaagttacatttttttttgagcaataaactttagaacaaaatgaggaatagaaaacaagatgtcgagacaaacaagccttagcgaggcagctgttaaaagcagccggacccaaacagagcataaaaatgcatgtagtccagagaagcactttttctttttacggctctaccccgtatttcatttatatttaaaactgagttgacgaatatgaatacagatatttagagttattgtaaagtcgtatttgtttatgtgcgtggtccagtttccaggccatatcttacagtttaaaagggagagcagttaatggtttcgcccacactgcttggatttttttttttattattatcctccagctcctattcttcaggtgtgcagctattttagtattatgaagaatgatggatgatgcaggaaagtttctttggaagcacttctgatattgtgcaatgcacttgggggtcagctacacttgactgatgcatgatttatccaatgtccctgccacttcccgagataaagctgctgctttatcraaaatgccagcaactgtgatttagaatttataaacctccgttttcaaataattgttctgattactttctgccttggcaataaaatgataaaggtaattgcacacaaatgtgagatagcaccaaaatacaataaaattaacctgaattagcttgacttgtcgatgagaagtatttatgaaatgtggtgttgcaataagggagggagagtgatattatggctggaaggtgagttattgctttaatgtgatactctttgaaatttaaaaaagagactgtttctgttgagggtgattgtgcttttgaaattaagttgaagtgattcttataattggcaacgagaatgcattttgaaggtaatatcttttattgtgttatgcctagttgcatcaccttttatttagctgtttctggcttcagcttttctaatactcaggtagaagcagacttggaattctgtcggatccaggggctgaaatgttgtattctctttgtagcaatgcccctggtcttaatgttacagactttttcctcctacatttgattaaattgtttagatatcaaaggttaaatattatagctagttaatgtttttttaagtttaaaggcggttttagaaatgtgttttgtttccctgtctttgtgtgcactgggaacatctcattgtagcctgatggtttcaacagtatcagatcagggttccatgtctgatacccatagttcgtaatctgccttttacattcctgaaatgaaattcctggataatatccatctacatgtactatttaaatgaaacactttaggagcagtaatttataataaaataacatgccttcagaacaggaatgcttgggcaggactctgctagcagacataacgtggcaatcaggtgtatgtacctggaacacagcagctgcaaatggagattgagacagttttgtttattggacattcatcatctggtcaacgttgacattggtgatataatttttccaaaatggtggacagcttttgtaaagtttcaaagaaaatgaagttcacctttccattgagttacaggatagttgtgttcttagaaaactttgtgtagagaaaaactgtgcagaaaattttgtgtttgcagtaaacagaattctagtttagggtcttatgaattttagatttgaatgtgttgcaggacagttgaaagtgacacaggttgcaggacgacactgttgtttgggatgggagaacattctacattcttgattccccccttttaaatgtcgatagctcccacaaccattgtgacaactaaaaagtgctttcaaattctcaataaccccctcttgagaaggactagagaggatgccctccagaacatcctcccctggccagattgtgattagatcaggagcttcccagcaccctcctgctcagagagcctgtgccacctcacatgccaccatgggaagcctgagattttggttcccactgttgcctgggaatccatttccaaatgagtggggagagagatgtcatcaaagctgagagtccttggcaattgattgtactgtagtgccctccaccacctttaggacctgattttgtctagcctaggtttgtgtgaatgtggtagggtttttttttctgacttggtaataaagtttgtagtattagtgacttgtaggatatctaacaaagatgaagttttggaaactaaggccaactttggaaagtgttatagacttaaaattgcagcgtgtgtttccccctgttgactttgkgagtacagcactrgtatgctgtttttccaaggagaatgaagtattgggaragaattgctcaggaaaaatataactagtaggattttttccagaaataataaatggaattgagaaaattgaagtgaaacaagattctgtggtagataaatatctcttttagtcccccaaccccrcttttattttctagtctattgataaactgtatattattatgatagcctactttgactcttggtttgtaaaaatgaaagtataatacaggctttatgattaggctagtgtgaagttacatgttaaaatagggggctgacaacatatcaaatacctgtgtaatttaatattatgtgataaatatgtaaagtaaaaactgagattccattttttccaacattttgacttaaggctgaattttaggggtcattaaattatcatggagctcagatagatacacggtggttctttgtcttactctgggtgtgagcaagctggtcttttccttctttaaaaatggttgagttactttctgtctgcatctgatacatccagtatctcaagtctttgcttgcttattgtacattcatcatctggtcagcatggatattggtgacatcattttcctaagatggtagacagcttttgtaaagtttcaaaggaaattaaagttcaagaacaagctaataaagttttttggcttgttcttgctcatggtgtcttatttccatgttttcctgtttctttgattatactgggcatcatatttgagagattgctcattattcatgagagcagtgtgaagcctgaggggttgtgcttgtccctggggtagtttgatcccttcggtcaggtgctgagcacaccaacaggctttgtgaattgctcagatggccacgagctgagacctgcagagtggtctctcrtctgcagttgctatttttttttttttttttgcagcatttcctcactaggccagtggttttcaactgggggcagttttgtccctcaggggaactttgtcatggtagacatttgtggttgttacaactgagggggtgctgccggcatccagtgggtggaggccagggatgccagtgaacatcccacaacacatgggctagccccacaacaaagaggaattctctctcctgcaatgtcggtactgtcgtggttgagacagttcattggtctctgtagaacttgtttaaagcccagcttgtccctggccccaccccggatttccctgcctaccctcggttcatccatggcatcccatcctcttgggcaggattctcttggtgccatcttggaccccttcttctgttgtgtctttcccatcaccctatggcaaaagagttttccatttctgtggttttccaagcatcccacacctccccttgcagccacatacttagggctggtgaagtagccgttcagtcatctcactggctccagattgttctccaggcatccagggggcatttatgctcatgcccagcgctggtggctgcctcgatgctattgtagatgtccaagtcctgagccctcggactgctttcaaagccccagctgccctaccctgtcctcccatctctcrttcctataatccgctctatccgaaagagtcgacttgccatttgtacaactccatacttcacatttttcttttctctgcctttgyacacygtttattcaacgtacatagtacaaataccttcttaatctaccccctttaaactcctaaccattgttcaaaactcctcctcctatgaaacttttcttagtccttggatttggatgttgtcatcttcagggcatcttctctgggtttctttgagatcaacacaatatagtcagggctgtgggccctgagcccatctgaataggatcccagtcttcactctgccacttasgggccatgtgtccatcaccaggttacttgagatccccaaacctcagtttccctgtgtctaaagtgggggttccagtgctatgttatgatgctttgccaggctacagtggagagctaggtgaaaatgttcctgcgacgaccagttcctgtgaggaccgggtgaaacaggactgatctagtgttgaaaggtctctgtgagccgtcaggcaggtgacgttggagccagcctctccagggtggtgtgcgtggtgctgcagtctctgcatttatcccatgtccttgggtttggcttccagacggatgtgaatctcccctctggagcatgtagatggaggacaaggcctctggggcaggggtggcctggagacatcgcagtggtcttgtctggtggcacacagacatttcccagtttggtgcgggccgccctgtgcacagctgtcctacagcatcagagcaggctgtggaggcagggccaggctcactgggagcaatggccctgctggaggagatctggctttcagtccctgttcacagagggtcctgctgaattggggacaggggtgccccaggagtgagctctgcagtatgtaggaagtcctagttccggtgctgggggaggaacgtcctgagagtgggccggaggagatggggatttatgagctgagctgtgggaagcaggcttgcagagcctctggtgagtgggccaaaatgacaaatggattctgtgcaactttttattgtccagcctcacactgtatttcttcgcgcactgctgtgtttgccagggttttgattgtattagttacttgtgagatggagaaacctttccgtctcccaaaataaatatggatctgctttcaaaatgttttagctgttaaacttcagcagctagcaaacaagccgaaagcttttgttctcattccaccacaggtttgtagagtttgaatcccagataaaacatgtaccaagccactggattctgggtgggatactaagtcctttgcagggaggtgacgccctttgttctgtgacatttttgtttttgaggartctcccatttccttctctcaccaagttagttttctgtcttgggtggggctccctaattcttagggacctctggtacagcccagtagcagttctcagcctgtaggtcctagcccgtaggtagacagatgctgtggggcagggccagcccttttgtggagtaaaaagcccttttgcrggtggttctgatggccacascastccagccygcctggaagccgycatagagatagctttcacatacctggtgatacgtggcaggtccyagaaggtatgggtgaaggtggtgtgtaccaggggttggcaggggaaggaggaagagaggagtcgtagggctggaaaaggagaaaaaagttgatcttcacctaaaacagtgtgtttgtcagttgagaaaactggttttacacttagaagttaaaggtggagtatatcgaggtaaatgggtgctgacctctctggtatacaacagatttaatttttctttctttctttttttttttttgttttttgtttgtttttttatttcttttgagatggagttttgctcttgttgcccaggctggagtgcagtggtgcgatctyggctcactgcaacctctgcctcccgggttcaagtgattctcctgcctcagcctcccaagtggctgggattataggcgcctgccacatgcccggctgactttttgtatttttagtagagacggggttttcaccatgttggccaggctggtcttgagctcctgatcgcaggtgatccacccgtctcggcctcccaaagtgctgggattacaggcatgagccaccaggcctggccagatttagttaatttggaaaaccccattaaatagctcagatcagattgcttacttggttgaaaaaaaggcaaaggtaatattttctgtcatgaacaaggtttgtggatattgctaattacttatttgaaagaaataataaaatgaaattcagtaaaatcaaataasttggcagttatttgaaggaagcggctcttttctgctgggctgcgactttgaggagcagttgcgtcatttccgggtgaagccaagagcccttgccatcacctggctccaccagggttctctgtgtgttttccttttgggttgaaattttcccttttagctgcatgagatgtttattattgctactcagaagtgcctggaatctatattgctttaaggtgtgggatgaagtttcctttcatgatggtttaatttttattgcgttcgcatagagcgttgccgccgttcacaggatgcccatgatagtcccgcccctcgagacgacatgcaggattgcaccttccacgcccagcacacaccaggccctgcacacggttcctgtgtgcattagtgtggttgggctccttctctgtgtgtgtgcctggcacattcggatttccttgtgtccttgtgcgatttctatagaaaaaggtgtgttttatcaagtggaaaatagcttacagtaatggtagttaattattttggagttccaagttgtttagaattgatcgaattcctaaatcttgagttaaaattctactctaggatgactaagaaagacatgctgtgtttacgtgtattttccagtttaaccagaggtgactttagacaagtaattctgttctgccaatttatttctctaagtattgtcaatttagctttttcatgggattctgggatacagagttgcttggtccattgaaatctatatatgtaattttgtttttaatcaaacctaactyctgggttttagaaagcatctcctgtccacagcttttgagaaaggtcccrtaaattggatgacaccaaatggctccagcaccagaatgaaaaggaagagcagcagagacttggggcacccacctgggggctgtttcctagtgctgggcagaatcctggggtcagggttggagggccttaaggccagattggaggtgggagcatggcaaggttgccrtgccaggatgcacagtgtccatctggggtcctggagcggcctgggttcttcccgcagggtgctgtcctctgcctgacaagtcctgttccctgtctcctcsggagaacaccagtaccaggackccaggagttgccaggtgggggcatctaaggaaaggaaatgttcatgggatgcgccacagagatgatccctcggagaatattttccggtctttcatagaggctaaaatataacatagttgttagaaatatgtggttttgtaggaagttacataccttggggaaaacgctggaattgacacstgagaatgggtgaaatgttggaagatgttgaacaggtgagaggactgaatcggtgcagagccacacctggtggtgggagcacgttgagggcctgcgggtgcccttgaggaagggttttggtggatgacaaatatgataggaaccacgtgtcttggggaaaacactggaattgatgagtgagaatggatacattattggctctattggaaattatsgctgacagatctgaagctctgtcatgcattgggggcttgctggttatttcagtttagtaatttcattgatctgtaacagatatgtgtcaaagagttttaggaagttgatagaagtgtacatattgatgaaaataaaaattcgtaagaaatagatgatgggttcaggtacagaataagggcaggaaaataaatgaaaccagtataccagatgcaggcatgtgcttcccatgatgggaaccccagataccagacgcagccagatgcagccaygtgcttcctgtgatgggaacccggtatactagacgcaggcacgtgcttcatgcagtaggaaccccatatatcggatgcagccaygtgcttcctgtgatgggaaccccrtataccagacacaggcacattcttcctgtgatgggaacctggtataccagatgcygccacgtgctttccgtgatgagaaccctgtataccrtccgcagccagacacagacacgtgcttcctgtaatgggaacccgtataccagatgcagcctggtgcttcccatgatgggaaccccatataccagactcagccacgtgcttcatgtgatgggaacccggtatactagatgcaggcacgtgcttcatgtgatgggaacccggtatattagatgcaggcaygtgcttcatgcagtaggaaccctgtatatcagatgcagccacgtgcttcctgtgatgggaaccccgtataccagacacaggcacattcttcctgtgatgggaacctggtataccagatgcagccacgtgctttctgtgatgagaaccccgtataccatctgcagccagacacagacaygtgcttcctgtaatgggaacccgtataccagatgcagyctggtgcttcccatgatgagaaccccatataccagaygcagccacrtgcttcatgtgatgggaaccccgtataccagaygcagccacrtgcttcttgtaatgggaaacatcttkgaatatgccaggaattaagcagtgagcttcttgatggtcagaacactgatggcacccaaagtagttgcgttaagccagcaccaaggttctgggttgtgtgttttgtttaacacagccatattcacctggccatcagttttttagtgaggagaccttcccagggctattggggatcagatgaggggcctagcatatactaagggcmgagctctgaataggttaacaagagccctagatcccattagagctgggactagttttatctgtgcaggcctagagcccccctatgcaaagtggcgtctgggctggcagcatcacctgggcctacccactcctgctgtatcggaatccgcattgcacaagctcccagcactggccgctgtggagggaatggcgctgtctcgtggtaccttctccccaaggctggctgctrctcttccttaggtctgagtctggctgtcctctttccaggtcgaggatttaaagccgcctagctcagggctcagtcctgggtgtgtggctggccaagaaagggcagtgaattcaatttgctaagtgtctgctctgcagatgcaggatgctggagatggggggcgcagaaagaaacaggccctgattctgccctcgcacgtggtggggtagaggcggcgaggtgttggcagccatccctgctttaattgacctgagttgtcattccctcagcgatcagtttcacctgtttgcggactgcctgtagtactgcttgcttcttgttttctttatatcaacttatttttaaacacccgctttaacttcttcctaaggaattgcagtgagaacaagtgtttgctatgctcattttgtttattctgttacacgttaatttaaatctatagttaataaactagtgtctcaactaatctcaccacctgaggcgtgttcaacaccctagagtcagaccacagcctccctgtgacttccccacaccaggtctctggaagggtcgttctcatgcctttgagcttcgggtctttcatcatcagaggaatggacygtgtctcatttgcagggctcttgtaaggattagagaagaggaaagtgagtgcctggcatgaaggaagtaccatcaatgtcactaaacaactcttactattaagtgtttctgagttgagttgtggcttakcgatgcgtgaagcagttgttgaattgtagtctgtgccgttcagtgccttgaatataagtatatttgataacgtttatgataagtgttggtgaggatgtggagaaattggaaccctgtgtgttgctggtgggaatgtgaaatggagcagctgctgtgggacacttctggaggttcctgaaaacatgaagcatagaattcccatgtggcccagcaattctrcccctaaggacataccccccaaaattgaaagcagggtcttgagtagatatttgtacactggtgttcatagcagcatcattcacagtggccaaaaggagaacacacacaaacgtctmtctgtgagtgaacagatacattaaatgtggcctatccatgcaatggaacattattcagccttagaaagggtgggaattctggcacatgctgcaacatggacaaactttaaagacattacgctgagtgatataagccagtcacaaaaggacaagtactatatgggtccacagacatgaggcacccagaacaggcagattcagagatcaagtagaatagtgggtgctggggggtggggagagctattgttaaatggggacatagcttttgctgaggttaatgagaaaattttggctatagatagaggtgatggatacacaactttgtgaatgtatttaatgccactgaattacacacttacaaaatagttaacataaatattgcattttgccacaataaaaatatatttcctaacatttaaacaaaaggagtgtctgggacgttacctctgacacacctggttatttggcaccaccggcgacccctggctgctggcaggtgtctggagcagcagctcagagcaggaggcccagaatccacagtgccaggtctaggagtgcaggggtgtggcaggaaacgtgaccccgcggctcctcttcagagcctcggggaccaccaaggcagttcttgacactttatcctggccttggtgttcagcatcggaaaacaaggagaactagaatgtcttgactttctaaaggttgttgtaaaacaagggaaggccatgatgcagtgagttttatcacactcttgctgtgaccttcatgaggatgttggagcgtcttttcttcattgcggacagaggcttccaaactccacggctgagccccagttacagtcagtgtgcagtaagtcctgtgggtagtcgtagaagtggagaaaatggcagtatcttttctctaaaaaacgtttacaaacagatacttaatgtgagtttgcttgctaataggttaggttcttagagtttaaagaagtagttaattatcaaagctttttcattcttgacaaccagcatttttcctctaattcaggctacctttgaaatgaacactgcagatctctgagattttcatctgtgaatgttgtttgaagaattcattctgctgcaatttagataaaatgtacctgctgaattttgtaataacattcacaaagttttatatttttgttcgtgtttgaaatatacaatagaggttttcctcgtgatagtgagaatatatcaatatgagagagatacaattatatcaatcaattatttgaacaaagattgggtattgtttacatataattttgtaataattcctatttccaaggaagaacaatgcacaatactttgtcattgtgtcatttatttttattgtagtcttttgtttttattgaaacatagattccatgtataaatgtggattttatgtatatctttccccgtgtatattagaagtatttcaaatcaaataatttggccaaatgatttttctatattaaacattatattttcatttaaaccactataatttctcctagttcagtctgattccttcttgcttttttgcatacagtgagtactatggtccaaatgtttgttctcccacaaaattcatgttgaaacctcgcccgtaagttgttggtattaagagttggggcctttggggggagattaggttagtgcccttatgaaagagactccaaagaggtagagccctcgacgattgaggatgcagcaggaaggygccatctgcgaggaagtggggcctcaccaggcactgaatctgccggcgccttggtcttagacttcctggcctccacaactgtgagaaagaaatgtctgttgtttatgagccacgcagtctataggattttgttatggcagctcagatggcctaacacagtgagcatgccccacccggagatggccttgcccctcttgctgtcagcatcaggactgacagaagctgggcccatgcagattttccggaagctgtgtcaggtattgggggtcattggactctaaccagtacccagcagacagatgggacctgagagaaagggttggggtctgccccttctccgctcctcagcttcctgcagtggctgggggcaggaaggagggcacagttcaggggattgagagacgtgtgctgactgtccagcagcagcagatccacctgcaggcacagtgcagcctggtgtctcgtctgagaggacacgtgtgcaggacaggcgggacccacagctgctgcttccccactcgccaaggccccgtcaggagcagcagctgcggccctgggagcccacagtccagccaggaggtggtgagcacagggcggagtgtggggttggggactccacttgtggtgttcccagatttgggggatttccrcaaggccccgttgaagggcagtgctccttagatacagtgcagagtccttggggtgagggtcctgtctcattacttgatagcacgtgtcctgtctcattacttgatagcacatgtttcagctggctctttaatgggaaagttggtgctttagtggaagctccagtcccctagatayagagtgtattgcggatatttatcccttcctggctgagcgcggggcagtttctgcctgcagatttgggctctggctctgggttatggacctttgaatgtggccatgccagagtttgtgaccttgacgtcttgaggcatcctgtaagtggtatgacctcaagggaagaaagctagcgtggcctgcatacaggtgggcctgtggactgtaaaagcaggtttacttagcgggagtarttacccatgttgatgacagcctctaacagaggtgcagtcttcaaattcacatttaaatgtctctgcctgctactgagaaatccacagcaagggaaaagagcaaaacagtctttctrtgaagggtctgttttattttttattttattttattttaattaatgagacggtgatcatccagggaacaggatctaaacgcagtctttgaacttgaactctgtatgtggtgtctacaggtttgggtgtgagcagcctcactctgtgctggttcccagcttaaacgtccaaggaagagctcatgacagtttttatattagttctttaaatattttattgtaagttcgtctcttcccagcccctcttgctatttttattgctccatttgaagttccagccaatagcccaggccctttctgtctttgatgtctgtatggtgggcaagatctcatcacgacccacatcagctttgcyrttagaaacgtgttgccayagaggagcacrttcataattgaaatcaccaaatagrgaattctttctagaggcwgtggctgcctcagtgaaacgtgcatggctgagcagagcaaggaagagttagtggggccgggggcgtgctgatatcacagtggcgtggggtggggtgaagggatacaggtgtgtccctcytcttacccggcatggtgtttccagaaagcagatgggagagctgtgtgatgaacaggtgagacactggctggacccaggtgagctgctatagaagcagaatcaaaaccgtgtagcacgttgccttccctttcccaatactgtaaagaattcctcttcaatggaaatctacttcaaacttttatcagattaattttaataaaaagctgaatcaatacgaagcagcttgggaaaacagctttcccccaccccagcccccaccaccaataacattttacagattcaggcccagtatttcttgtttctaatgagatggaaggagcggtattcttggcacctgctcatctccttccctttggaaactcagccaggtttttgtcgttagcttatgggtcgctaatgttatgtgcactcatagcagaaatggaaatccgccatcggtgaaagtggagacctttgagaatttatgcagcatcaaaatgtaaataccaactcttatagaatattggggttagcaatgtcgacagttctaccccgagtgcggttggtggtggggctccaatggaaacaaactggtgtccagcagtcagctgtctgcgcatccgtccctcccactccagcttctccaggtaagactggccatgtgagcacagagggtagaagaaggccttagggacaccttagaatgggaggagaggtcatagctggagctccgcttgggggtttctggtgctccgcccatggctcctggacagcgaggggcagtcttctgaatggacctcagaggtcctgtggtcctctttggccagagggcacgggcccccttagctcatttctagtaatgggatgggtgggtgttaggaggaaacacgcagcccagcacaggctccccagagcacatcgtgaatctttctgtcgcctccctgccccacctcacctctgttctgtggcctccctgcactgtgcccctcctgtgtcctcagttgccacatgactgacacgtgcttggggctcatttgatggctctggcaactttctctacctcggtttaccttttggctgcccagtgctggatcgccagtctgctttactgttcacgggaggaagggtgtcacggcgtcacacatgggcatggcacctgcgctggggctcacctgtctcatgaggccgtatgtcgcacaaggcttcttgagggtggggtggccatgagcgagagcgctcgcctctgtccttttcctgttgcagaggaggaaaaagtctggggccctgtttgctcagggtgggctgaggcccagaccagcttcctgtctccacaccctgactccaaaccctcactgtgaccccacgggaaagcatattcccaaatgtaactgcgacgccgcagcccgggactgctgattgaatgaatgagtattctcctttgggtttcccacagaagttttcccccagttccctaccatgatgggttgtggctttgtcacccgcagtgagaatatgcgaatgctttagcagatgttgtgtggctcgggcctgcctgccttatttggagatatttcgcacctctgtgggctcccagtggcaggyatctctggggagggagcgctgtctccatcgtcctttgggaggatgtgggatggctgcaccgggcaccactctcacatggtctccacatcagraagcstatctcaccgtgtccagcattggtgtcctggccagatgctctgtttataatgatagaaaaaaaatttttcatctctgaaatttgccaccttctttcagcagcatttcacttggtttacttccttaattcacgaaatatgtgaaaaaactttataaatcttaaagatgagaaaattctaaatgatgtgtgtacagacacacacacayacacacacayacacacacacacacacacacacacacacacatttggcccttggacaagacaggtctgaactgtgtggatccacttacacttagatgttcttctacctcagccaccgcagagacagcaagactgcccctgcccctcctcccctcccttccccctgcccctcctcccctcccttccccctgcccctcctcccctcccttccccctccccctcctcccctcccttccccctccccctccccagcctactcaccatggagatgatgaagaccttcatgataatccacttccacttaatgaatagtaaatagattttcacgtccttaggattgtcttaataactttttctagtttattttactgtaagaatacagtgtataatatgggtaacatacacaatatgtgttagttgaatgtttatgttatcattaagacttccattcaacagtagggtattagcagttaagttttgggggagtcaaaaggttatgtggatttttgactgtgtggggcttcracagcccaacccctgcactgtccgagcatcagctgtatacatacatattttgccgtttgtattatagtagctctgtgcatggggcatgtctcygcaggaagagggactgtcctgactcttgggcctggtggtgattgtctggggcactcctcccagagccctgactactgacaggtcacttcaagaatcaaagaacctcgactatgatgtcatttttctgtaagccctggactactataaattatgttttatctgtcataattaagactyggagactaccaagctgtcttcgaggggaaaggcctgtccctttctccagagaaataattaattgttagagtatatggtttttgaagaatttactgtaagataaaagactggtattttattcttgcatttattagtatttaatcaaatggaaagtgcactttcagcctggaaatcttggcttcagctgcaggattagactgaattattgtttaaagagtaaaaggtatagaattatatgttcaagttatcaagccactgataggttttgggtataatgtaactaatttagaacataaaatttcctgccttgtggactagagcatcggattaatcatttggaagcggggcgcacttcctctgctgcgtggcctygcggtgagatggagcctgtcgctccaggagcacgagacctttacggagttcrgtgccgtcaaggcccacttgtccacagccaccggagcatgttgggaacaccgggagccgctggaacgtgtctggaacaccaggctcytccattcgggacactgagtcataaatcrtcccatgtgtctcaygcaagaattcttccctgcagaaatttcatgaaacttagtctttgctaagggtaaagaggatttaattctctttgttctcagtggtgtgcaggcttaatgctcatgggtgttgactggtggccggcacatcagtggctcgtgggtgttgacttgtggctcctggcattgctttgcattagaggatagccggcctctctacaccatgacttagaaaattccagccaggcacagtggcttacacctgtaatctcagtgctatgggaggattgcgtgargccagaagtttgagttcagcctgggcaacatagcaagaccctatctctaccaaaaaagaaaaagaataaagaaaattccagaaaacgtttgtgacagcatcactgttgaggttgtagtgccacaggcagtgcagcaagcatctggtttatctgcgtgagctcatgacgtgttcatcagtgggcagaaaaagatgggatcagacaaaacagatgctytcaggatccttcagatcaggatggcaaatgtttcctgaaatgggccaggccagaaatatttctggctctgtgatgtacagccgctggcacagctacctgaccctgctgttagagctgctgcagamaggacccagaggaggagtggggctgctacccrtgatgctagaccgaggttgcygaaactggagtgtcccattgtatgcacgtgtcctaaagcatctccttccatctccttgtctactcctaccgtgcgcatacagagcccctatggtgcragtacagagcccctgtggtgcatgtacagagcccctatggtkcaggtgcagagcccctacggtgcaggtgcagagcctctacagtgcatgtacagagcccctaccgtgcaggtgcagagcctctatggtgcggtgcagagcccctatggtatgctttcagagcccctaaggtgcacctacagaacccctaaagtgcaggtgcagaatccctacagtgtatgtgcagagcccctacggtgcgggtacagaacccctacggtgagggtgcagaccccctatggtgcgggtacagaacccctacggtgagggtgcagaacccctaaggtgtgcctgcagagcccctatggtgcgggtgcagagcccctacggtgcgggtacagaacccctatggtgcatgtacagaccccatacggtgcgggtacagagcccctacrgtgcgggtgcagagcccctatggtgtgcrtacagaacccctrcggtgcgggtacacagcccctaaggtgtgcctacagagcccctacggtgagggtgcagagcccctacggtgcgcgtacggggcccctacggcacgcaggcttgccccgccacctgctgtccccggattcctgtcagatgtccgggtgcccagcctgactgggcatggccctcctggaagcagtttcagggccagttctgatctcaggtggggatggagagctggtgtctgggcctctcagagctcaggccccgcacatcgtcagagtgacctcaccagctccaagtgccccttttccctcagtttcattatttgggaagtgaggaggtcacaccaggctggacacgggatttcaatccgtgtgtccccctgttgcccggggtggctgcatgcagggtgagttcagggaagctctggatgcagtgagcgaggccccrcccagcctcttggtgggagtcactggcctcacagctcactgcaattcagagacctgcagtgtgaagattcttccagattactggatggaagggacttcagtgacctcatgtaagaaaggaagtcacccactggtagcctcagagagggaacstctggcagtctggctcacagccggggcyagattsaaactgtatccaagagcagctgctgagagacccacctcagtcctgcaggagtccaggctctctcccaggcccccagggasggtgtttccacctggtaccttggggagatgtgaccagagctgctggagggagcgtctacctgctggggtcagggggtctccatccgcccacagtgtcggctcaagaagtgtgtgctgtccaccccaggcccagggcaagtcccacgaggccgaggctgcaccttgctgtccagggggccgcagctgaggcctgtgcagcctccccggtgctagtgccagcatggtacaggagtcgcagctccaggaggacatgcaggctgcctgccatgagaacatccctctgctgtttgcagaccgaggcccatgggtgcagaaggaagcgtgccggtgcagggcacgcagggccgatgggagatggactgaccagtggtctggaccgagcaggcagcaaagggccctgtgtgctgaactgagctgctgggacttaatgcacacagaaccacagaaccacagaacgtaatggagaagamttgggtaagggtgagtgggagataaagaagccatcagaatgctgctgagtctggtgggggttggaggtcaccggaaatagctcctcscaagttttactcagatcttcttggcagggtgcatcttagcatttgtagaatgcaccaargaatgcctgggaagggcatgggggccctgcaggggtcacaggctgggagaggaggggcttactgccttgggcccctggacacaggtaatgcctttgcctcaggtggccagaagtgcctgtaggctttgcagaaagctactgttcctttcctgtgtgggtgtgtgactcctggacggttgccggagattgccctgaggctggggtgggtgccygtcctggagccyccatcccacagtgctctttgtcygtaggatctgcgcacacaagggtttggttgttgaacctggagacacacattatggtgaatcccagtgttgactgattatatcattaagtgggtcacatgacacaaaaaccacacgttctgaatgtacaaattccatcccagtgcaggtggaaatttgtattaaccatggctttcttcacatggcttctttgcaaacaaacacttggtactttgctagtacaaggtccttccttggtggggaggggtgtaatcccatgtcgatgtctggacgaggagaaagaggaacttcccctcagccagtggacgagactgtccaggctgctccacartggccacagagagcccccggcacctgctyggggcaggaattggtggctttggccaccttgcttaattgagaaagttgatgtttccgtcagatcttcttgtgttcgcacatgttacytattctctaagaagtcagtgaaacttcacccaactttagaggctataaagaatgaggttattttctgccatgacatatttaagctgaagcttcccaagccataacagttttaagaagtgacatttcattttgarcaccagcctgccacctctttactcctcatgacagactgtcactgtgcagcgcagcagttagttggttcctgaagtgccagaaaattcccaggttgtgaggagtgtgctgctggtggggtgagatgtgcgacccggcgggggcctcggcgggcacaggcgggagacccgggccagagccctgtgggntgagcgccatcctggccaggccacacggccggggcagcttctttcccttctgcaaggcagttggcattatcgcggatgttagcrtaggaagttctagcgggactagttaaaaatgagggaaaacatggtgttytctyattgtctttttcctagtaaactraaggaatcatgcttgatgaaggctcaagtgtagtatgattcawtcgggcatgagactgtgctgaggtctcggatgtctcgggcctggggtcagcttgaagagattcataggcggrtctcgaagcccatgctgctgggagggccgggctgccgacgtggacgggtacagctccctggytcacacaagacttggggttccctccaccgtggaatccgtcttgctttcacgggatttggggactgtgaaatctcttctcttctaatgcattcccgttgtctagaggctggggagcaccatttgattttaaaggaacagccacagtcctgccagctccatagagagagcagaggtggcctcatgttctgagcagagggtgccatggtatttctgaccaggcrggaccctggctggactcacgagattgtgtgagtccacaatgtgcttgtcagaagccaggtgtcctggagttagggtcagattcccatggtgggtttcattaccctcctagagactggcggggtcccagcctcttggaagtgtccgctcagacactgccaggtgccttggaggtagcagaagcatctcttgatggcaagtgtccattgtgacctgtgttgaagacaaggtctgtgtgagaaggtgcactggtacctactgtgtcctgatgacctgggagtgtcgtgaagacagagcagccagtgaccttctgaaaccaaaagagtggctgcccactctgcctcctggctctggcacggggacggctccagggttctaaggcctaagctggctgcactacctcccgccctcaaggacgattggcatctctggcgtgctcaggcccctgcagccttgccaaacaaacaaacaaacaaaaacaacttgtaatttttcattttatctgtattttgccattaaaatgttgttctctacacaattagctgcaggacgcacagtgtttagcctgtggacgtgtctcccagctctgccatgcaccgtgcgtgtacacctgagtgtactcaggtttgcatacccccgacactgggacattgatgtcatggaatctcttcatatagatttttctttggtctgcagtgacatggcaagtagtaaagccttttatgaaacctcttaaagaaacagatgatagttactaagaagcttccaaaaagacttttttttttttttttttttttttttgagacagagtctcgctctgtcgcccaggctggagtgcagtggcgtgatctcagctcactgcaacctccgcctcccgggttcacgccattctcctgcctcagcctcccgagtagctgggactacagacgcctgccaccatgcccggctwatttttttatttttagtagagacggggtttcaccgtgttagccaggatggtctggatctcctgacctcgtgatccacacgcctcggcctcccaaagtgctgggattacagttgtgagccaccgcacccggccccagaaagacgtttataggctcatcttgacagtgttctggtatcacaaaccaattgtcagttagagctagagttggtttagctaaactgtcggaatggatatgggagtggcagttataatctggaaacattgttccaaagtgctttaagttccagggaatttttggagcaatttgttaaaactgtacacatttacgttttctgcccttttctctaggtgtgatctatttctttcacacacacacacagcagtttgtatgttaactgcttgctgactgatttcctgcttgattgcacagattcaaagcagtgcatgagcttcagaacagcgtttatcttcctgcattactcatatttagttccatatatgtaccaaagagaagagttcagaaaagaaaaccagattttattttaagtatgatttttaaatgtagacaggtgccagtttatatctcaaaatgggtgatttaaagaccagtgaacagatttccttagatgtccgtctgcttctgggatctgatgtgtaggcatcttcaygttggttttataatgtgccacgcgtcaggtgttatttcgatgactatgctgagccctttaataagacgcacgtgcctggggtgcttctggaaccttgccrccagggctcattctttgaccatccctaattccccagggytcttgttgttagagtattctttacaaccaaarcatcattaatcagaaaggtgctgtgcggtgcggggccggctccgawgacagtaataaaaaccggcacacctcctgttccaggacccagaccctggaagtctgtgcctaagccaagacatgagcagcgtttgtggaatgcggcttcagatagaaaccttctttcaatttgcaggcctggttatgtaattctaatgcagaatctcccccttcgtgtttgcatgcgtgtagccgggttcacagaactttagccacaaacaggagtgtttccctttttccagggctcccgtgttaggcccccaccaggaggctttggggtggcgtttgggaacgccgtttggatcccttctcagtttgacatcctaggtggcagctccagttttgtttggtgaaacgatttcaatgtaacagaacccctttyggttgtgagagcagaatgaactgagccgcacttgactgtcttgtgctggatgtgacccagccgaatccayggggagacccctggttacagcggggaccacgggtggggtctcagccgtggccctttatacttggtgagcatcagccacaccacgtggccaggtttatgatcaggtgatagggatgaagtgtttttgacacatgcttttctttttttaaattaaaatactatctcatgcctgattttgaggtgggctgagcatgagtcctgaggatgagaggggcttccccaatgccccttattccctgttcagaagggagattgcaaagctagttttcatcttgtgatgtctttgtgggaggttgtgaggcagtcagacacggtcctcttcctcccccaggtgagccaatctcccccttcacacagacccgaagcccaggccacaagggacctgggctaccttgtttgtaaacagcttataaggaggctggtgatttttcccttttaacatgttygtttttatgtttttgaggtgtggtctcactgtgctgcccaggctggtctgcaactccaggactcaggcgattctcccacctccgcctctggataggtcggaccgcaggtgcacgtcaccacacccggctagtctgtttctgtgtgttttcattgcacaggataccrgcagtggaaatggttaagagggaaagacacagagctgcaaagatggtcctggaaggacggtttttagacctgacagtttttagtgcagcaggcctggaaaacgactaccagtaggggaaaaagaagagtttctgtttctgggtctcttccttttaatatggcaggaactggcctctggygccaactgcttaattcagaacattgttatttaaacgccattcatgttaaaagggagatgaaacgaaattcatttttccagaggtctccaaatagccatgaaaaatmaatttttttctgccaccaagtaccatcagccactcatgtggtttaggtggatgcygtggtggtgcygggagcactaccagcctgtggggccgtgrgcttgtgcttcgccggagtgggaagtggggacattaggaagcccgactgttgaatcgcctgggcgtcctaaatgtgggctgtgttgtcgtccctgtgcaagcccgagaggcagacagcactgagtccactggatgcctgcttgtctggttgccccttagactatggtactctcagcgacacggctgtcccattatgtgcacatgccctgttacagcttttggagccccccttaggaccgatggttcgaattctggaagtcctaaacatttgggtcttccacgtcgctgtttattctgcagatttgaggctggcgtgtttgagttagacgggacactggggctgcccgctttcctttgatggtacgccgagggcctctctgccccgtgtgttccctgaggttccagtgggctgcttcagggaaggcgggccgggaattcctctctgtaagacaggccccgttttatgcagctgtgaaccttgtgcttgggtgtagtaggtggtcggctcttttcttttctcctgttcacagcacgcttatagccagagcagactmtatggtttgcctggagagagcttgcacacacatcgtcaccctgtctctggtggttgtggctgcagcctcccagacgcctctccctgtccccacccttgacacgcctggaatccgtgttctccctcgtttctccgacttcatcccaggacttggccctcacggctccaggagctgctgaggcagcttcatctcaaagccaggtcctctccctcctggtgacctggccaccaccttctgctccttaatgctctgtgctgcttccagcgccagtgcctttgcctgtgcgcacctgcctgcctcagtctctcctctcctcctcctctccacccagaaaactacaacactatcccttctctctcagcacctcctccaggaagccttcctggactcsccaggacatccaaccccttgatacaggctctcattaatcctggagttctccttctgaattcctatctcaattatcattgcatgattcatataattagatattttgttcaacatatatttgctgagaaatcgtgggtgccaggcactgttattctaaatgctggggatacagcagtagatcagctaagactactctggtttgaagaaaaaacaggaattcctcagaacacagacttgaaaccagcccaacgttcctgttctcacacaaggagaagcctagccagccatggagagctgcagtggtatagtggccatggagagctgcagtgtagtggctgtggagagctgcggtggtgtagtkgtgcttctctgagaaagtgacgtctgagcatggttgtgagtgggatgacagtggccactgtgcaggctgggaaggagacagcagtagcacggaggctgtgaagcgagagcgaggctggagtgtgaggggcagtggcggggggagcgggggcgtgggtgcgatggggtcatgggggactgaggccagagaaggaagtgtggccctgccgaatttgggaccatttgggctagggggcccccaaagagacctgccgtgtggagacyagccatggagaaccgtggtggcggagtggccgtggagagctgcggtggtggagtagctcacagtgttgggccctgatctgtcaaggcttttggccttttcctcatgatcactaggtggttgccacagctccagccatcacatctgccatgtcaaggaaggaagggtaggggatggtgccatctgactttagaaaaagtatatgaaaacaagaactctctgcaggcttctcctcrctctttggctacagttgtgacacatttgctgcctgtattggagcttacattctagtgaaggtgacacaacaagtaagcaaatcacgtcactgtgattccaggtcatgtaaggaaaataaggcagagaaagaaggggtggaggtggtgactgttttcggcggcttctctgagaaagtgacgtctgagcatggttgtgagtgagatgacagtggccactgtgcaggctgggaaggagacagagcggtagagcggaggctgtgaagcgagagygaggcyggagtgtgaggggcagtggcagggggagcgggggcgtgggtgcgatggggtcatgggggactgaggccagagaaggaagtgtggccctgccgaatttgggaccatttgggctagggggtccccaatttttttggcaccagggaccagttttgtggaagactaacttttccacagatgggagtggggggwtggtttggggatgaaactgttccacctcagatcacyaggcactagattctcataagaagcgtccagcctagatccctcccatgcacagttcacaataggcttcacactcctatgagaatttaatgctgccrctgacctgacagtaacgctggctcacccgctgcttacctcctcctctgtggcccgtttcctaacaggccacggactggacccctggtttaagccatatccacaggaagtgttttctcatcgtgatggaaatgaagggaagatgtgatctgatttacttgtgtgtgttttcattttattctaatctttatttttttaactcacagaattattttacacctcagtttttattcagaaaagcattaaccatcatttgttttgcatataagacatggtgagatcacaataagtggagaatgtttgccatygtttttctacttgacatcaacagtgtaacattagcttttttttgtatgttatatttacccatgtattcataatttggggtactctttatttctttgtatagctctcatttttctttttccttttttttctttctttttgtggggacagggtcttgctctgttacccaggctggagtgcagtggcactaccgtggctcactgcagcctcgacctcctgggctcaagcaatcctcctgcctcagcctcccgagtagctggaactacaggcacatgccaccagcctggctaatgtttttatgttttttagtagagctggggtttcgccacattgcccagactggtcttgaactcgtgggctgaagtgatcctcctgcctcggcctgccaaagttctgggattacgggtgtgagccaccatgactggcccagattggatattaatacagtttttttctccttgaaaagttgactcgtactaactatagaaagctgagagaatgcagataaaaaaggaatagtttaaatcatcctaccttatttgattttttaaaaataaacwgattttggaataatcttagatttttggaaaagttgcaagcaacgtayggtgtggtttactttttgtgggtaatttttctccccccaggagatcacatttgtctccttccagtttctggcaccttagcccagtagctcctgtgtaggggtgctaaggcattggttaaacgtctcttgatcgttcctggtttgtttcccgttatttkgtctcccttttgcttctcccctggttgggtttctcctcacttctcagtgggttatttccacaatcgaccttggttctggaccagtcttgacagagctgccagagggagcctcgaaatgcaaaccagctgcatctcctcttgttgaaaactctgtggcttttcagggaaaaggcagccagcaggacyggcctggccatggcggcctcagggcccgagggtggctgtgtcccccacgcctctccaggcacaccaggcctcatcccccagctctcgtggcgggtgccttcaccctggcctgcgtggctcctcgcccggtggcccctccccatagttcagttctctgtgtaggtgtcagtttctccataagctctcagctgcccacactctccccccgaagtgtggccccagccctgcggagtrgttccctaaccgccactctgcccacctcgtgctagcctgggtgtgggcttgcctgctggctctgggctcaggctggggtgctgtcagggttgcaggggtcacagtgaatcttcatcttccgtgggccagtccccttcccagcgtccctcctggggctgtgggtctggcctcccccgttgaatggccctctcttgaggttgttgggcattggtgaagatcctgatgggrtctcatcactggagtcagacgtctttcttcctgrgtctggggcatggcggtattactgtgcgggctgttgggagagggtcygttaccctcatggctgcttgtgacctgtccaggccaccactgtgccagcctttgtgtggctggtattgtggcttctaagttgagcctccgcctggctgggttgcgatggtttcactcctgtcaggttttcatgctattgaaactcacttttctcactgcctgatttctgccttttgtgggtccctcctggtgtccgtgatgccctcatttagtctgcaggcatccccccacctctctgctcgcccggtgtgcacacctgctaggtcagccctgggcatcgcatcagagacgctgccgtgctcggtggcctggggcttctgtcctgtagaggcctcagccattgcattttaggaatcggcactaaactaacttctactgctgcccacagaagaactgtgccaaatgctctggttgtctaccggaaaaaaaggtagtatgcaggtttcagtggcatatcaaattccatttctgtgggcctttgtgggaggcttgctcttagcgggggctggtgggggtgggggggggtgggggtttgtgggggtgggttccagctcattgttgtgttcaggtgaaatgaggcagggctttattttgatcctatttaggttgtaagcaggtctgaggaattcacttcctcatgcttcacatacctaaataattagccagttggatatggacaggagctggaatctgttgctcatttgtaagccagattctgaactcattcattgttgcagttataaactggttgccttttttcggttcttggaatgatttggatggagctcacctggtccccccagctccctgctttgtgattgattcagtgtgttcccatggcttcaggccacctttgctggtcaggggagctggttcagagggcttgaggccagcctgccctttggatgagaggcccatgccatgatgctggtcatggggatagcaccacagggctcagtcggggatatgccagagctttagggtcccttgggccagcagctggggtccttgggcatttcctgggtggcggtgctctctggggtgcagagttggtcattccagggcaggcagttcacttggccacaccaggtttggctggaagccttctccaccgcattcccaaccgctggcctcccaagtttggcttcttgtggtcagggcccagaccatgataaccttgaggactcctctctccgggagactgtcggggctaagctgcctgtggccctccaccgccctgctccttcctccgggtgggggacaccccatcccccatgcccctacttcagcttgctgggattcacccccagtggccttccaaggctcctacctttctccctggccctgtctctgcacactccaatgtcttcccctttggctgacgcttggattgggggtgaactcgaggtgtggtctgtgcagaatggcgtgacagcccttccagcccgtcacggtgtgtagtgcccaaagccctggccgtggccatctcaggttagaccctcagagtggcactgtcaggtagaggagtcaggggtcttattgatgaggaaatagaggcttgagagaggagtgcgcagctagtgtctgaccagcccccacatggggcactccccagtccgaatgtctgcagtgcagcttcaggcgctgatgtgggcaaacccttcctctcccaggccgtcccttcctgcagctgctcggacactggcacatgttggcaggcgtcagcaccagggctgggctcctgcctgggactcgaatcgggagcaggtcccacggaggcagagcagccgagaatcaacggtggccatagccaccacatcctgtttccaggggcaatggtggcaacagtgccagctgccctgcctgctgtgcctggttgccccacagatgtttcctgaagcttgattttggctgtgattggagcgtggccagttctggttcctgctattttctgagcctgctcctccagccttcccagaagttctttgagttgtggagtagcctttcagtaaayggcatttgtgcttaaattagcccgtgtcagtttctgacacctgctgttaagagtgctacctgatrcaggtgctcggggctggccaggatccccacctgagtctggagccctgagcccaggcctcctgactccgacagcctgcagccctgcccgaactgggatgatagagcagcaaacatggctccatggagagcgaaacccaagctgggctgtttactgccagtctgctgggagctttgacccaccatcgtgcagggcgagtttccaagaaatggcgagagagcatccagatttctcacgttgcctctagagccctgttgtctgaccagtatcttctgtgaacatactttgggaaatgatctcatggacgcttggcctggatggtggtcacactggtaattcagttccacaagtattttatgagccccttgtgtgtgtgatgtgtgctgttcttcagggagccctgagcagagctgccagcatcctgcctgagaagcagtggcccgggatggtgggagatgtctgcaggcgcagggcggaggctgtgggccaagattgtggctctgagaaatggagatgsgagaaggggaggcagtcactttggaagaatgggcgggatggtgatgatttgaatgagacttgggggagttggggcagcgtactccaggggataagatcagaggtgaagggggttgggctaaaatgttgatcatggtgggaayagtagtgatccccaaatcctacagagcctttgggaagcctggtctttgcatacgttccctctaaactcgtgccgacgttgtgatttggtctgatttatcctacagacaaagacagttgaagcaccaagagtgattttctcacagcaaagggacagagggtgggaggccgtgatttgcaccccctgcctttatctggcccctgccacatggtaagtggaaggcaggtggctccttccacagggctctctttgccctctcgggaagcctggtttttacccttgaggcagcagggaggctgcagggtgagatgttgaaggagtgtgatgtgggcagagcctctgtgatggggcatggtttctggcacatcccatttccatattctggggtgatcgaatgggatccggttcaaatccctgtcagtctgcacagaaaaggggaggttttgcaggcggctctggagtgtgacagttgaggattgaatcttgagagtaatgcttctacaaaacacttgtgtagtttgcggtccgctgcccgaccctggtccctttaagggacataaatgcacctctctctcctcgttcttggaaagacagatgagagaaccaaagagtggccttagaagcatatgtaagacacagaaaggaaagatcagctggagtgctggtgaagggtttcacaggataggagaccaggcagcaaggtgcccagcggacaagcagggagggggccttcagtgaaggcgcagagatttgggatgcatgtgggattcagacctgcttcattgtgggaacagagcaggaaggtgccagtgagctgcccttccaggggtcagcagacctttctgtagagggttccaggggtccgcaggccttttctgtagagggccagagagtcagtgttctgcgcttgcagggccacactgcctctgtcacaactgctcacctctgccactgtagcacggaagcagcaggagattgtgtgtaaataaatgaacacaattgtgtctcaataaaactttatttacaaagacaggtgcagtgagtgagctttgccccacaggctctaatttgttgcccctgctccagccccttgatgtagggagcctttgctttgttgttctcagtgaactttgagggctgatggttgggttggagtggaaagagcccaggtgtgatgggagccgtgaggatggccttccttgagtagccacgagctgctgtgggtcttcctgagaagctgtggcaatgggaggacagaggtaaaatagcaagacccagtgcctaaggaggctgaagagggaggatcgctagagcccaggagttcaagactgcagtgagctaggattgcaccgctgctctccagcctgggtggcagagcaagacctcgtctctaaaaaaaaagaaagaaatgtacaagtgtaaaggtagcctatagatgtgttcccctgtattccccaggctctattcttcagcctcctgagcagctggaactacaggtgtgtgctatcatacccagctaattttaattcttttggggcagggtcttgctacgttgcccagtctggtttcaactcctgagttcaagtgatcttcctgtctcagccttccaaagtgctgggattacaggcatgagccactgcacccagacttgtacatctctttaaatgtaaattaaatgtgctttccacagcattagtggaacaccccagcattgctcatcctctccgggctggctcctaacacaggtgccgtggcataggtgctgagttgaatctctgtttttgtaagtcattgcatacatgcttcattctaaaatgtactttattccaaatattgaacagtttgtcttcgggatttattgtctgtggtagttgttttattaattgttttagtaaaacaaagttagcttagttgtgggaattatttaaaaggagctcttaccaggtcagcwtccttcggtgttgcgttggttaaagataaacgagaagaatcgggatacagtaattttaggaaataaaaggagactgtagtattggttggctgctctaggtaatggtggtaattttctgtcttcagagtaatcatattgtgaaaatgatgcatcgtataattccaaaaatgaggaagagctttggaatatattttgtgtcttaaataaccagtacttctgttgtgtgttttatatacgaccagcctcttacctatacactttgtcttaaaaattatttctgtttaggtacttggaaaaatggacaaggattgtgaaatgaaacgcaccacactggacagccctttggggaagctggagctgtctggttgtgagcagggtctgcacraaataaagctcctgggcaaggggacgtctgcagctgagtaagtatgagcccacgtgatcctgtatacygcacatgctgaagcaaccgaggagtatatgtgataacggcatgttttccattgatggcagggtaacgcatagccttacccccacaaccgcaaccacgagtccgtctctcaaaacagcgtgctgcgacggctcctgcatttgcagcttccctgtgtgttgcccaggagctctccacctccgatgaacccagggccgttcccttcataccctttcattagtagctctaagatgtttgattaaggtgtacgtttacagaggagttggttggtgatgagcattgaacatttgggttcttcggcatatgtctctggaaatttagagacagggagatgcaggattaatcttgattaaaaaaaaaagcccagatcagcgttccctgttcctccagagtctgccaggtgagtttcatactaggactgcttgatgttctggaatcccttaaccaggagtcccagttgccttttgagagccgtggtcagacccttggcgagggtgtggctgaggatggccctgccagggggaagggcccgaaagccccttttcagcatgactttaagttcttgtcatttctaagagcgtacatgtttctctttttgtgaacagctcccactatatttctctaattgcaaaaacgtaagaaatgtaaagcattccttagtgttttgctttgaaatgtaacatttaatttcctccgttcattctattaaaattgtagctcttgttatttctgaccaaagaagaagaagaaaaaaaaaacacccactcctatgcttggtgtttctcttaactggctaataaacacaatgccaagaacattagataaagaaaatacataagaaacataaaaattgattttaatgggcccctgtccgagacagccataatgagcacaagcgcagtcataaatatcagcactcgcctccgctgtcgagatttttcctgtagagctgcacgttacaatcaatatagtctttttgagaccaaaaaataagcaaacctttgaaccatgtgaatatactcttttcagtttctatgagaaccatctggctgtagtgttcagaaagtcacaggcaccaaataatttgtaggggaaaatgtcattttgtcttttagcatgttcagttgcacaataaatcatagaaattatgtgttggttttttttttcttttgggaaaaaggtacaaagtgaatttggggaagaaaaaggaaaacaaaacaaaacaaacattataagatatgtttagttaaatgcccattgtggattaggcaaataggatgaagacgcttaattttgaatttctactttatgaactttctgaatcaagttaggatcaggttcaggtgtaaaaacagccgtgaaataatgctaaatcctgaataggatctggctgattgctctcatgaaaacacacctgtggacaaaccatgggagctggggctggtgccttcatggcccctgggaacttgggctcctctgagcttggggtctccagatggtggtccctgccctggtgcttcaagacagctcctgggcctctgccacaggtaggggagaaagaaaggagggcgtgtcatatatgggctaaaattaggtgtcttgtgagtaaggaaggagtgggatttggggggcagccagcagtatttgtgtgtagttaattttagtggggggagcatttaaaagtttgagaatagtatataaaagtatatgaatagtcaattaagtttaacattttatcatttttaaaatttaggtaaaaattacatagaagtcagatttcaagtgtacaattcatttgacaaaagtgtacaaccgtataactaccgccgaagatatagaacattcaagatatggaacattccagaaaattcccttgtgccccctaaagttagtcctctttgtgaatttttgtttccatttctccagagtaaattcctgagtgtggaattgctgggctggatggcaaatgtatgtttaacttgacaagaaattgccaaaactttcttcagagcgggatggaatttccactagcagtgtgtgagtttcagttactccacgttcttggcagcacttggtggtgtcagtttttcagattttagccattctggctggtatgaagtatatctcattgtggttctaatttgcactttgctgatgacttatcctgatgaagtcttggccattcctatgttttctttgtgaaatatctactcaagtcttttgcccattttttttttttatttctttgagatggaggcttgctctgtcacctaggctggagtgcagtggtgcaatctcggctcactgcaacctccgcctcctgggttcaagcaattctcctgcctcagcctctggagtagctgggattacaggcacgcaccgccacacctggctaatttttgtatttttagtagagacagggtttcaccatgttggtcaggctggtctctaactcctgaccttgtgatctgcctgcctcggcctcccaaagtactgggattacaggcgtgagccactgcgcctggccaccttttgctcattttaaaattagaggtttcttgtttgtgtttttgttgatgttattgatttgtggttctggatgtaagacttttgtcagatgtctgtattgtgatgattttctcacaagttggaggcctgcttttttgtttttccaatagtgtcttttgatgagtagaggttttaaattttgaacaagtccatatgtctttttttccctttatgtttaacactttttgtgttccctgtaagaaatatttgtctactgtaatgtctgaaataaattctcccgtaatttcttttaaaagctttgtagttttttttatgtttagatatatgtgatccattttgaattacctttttgtgaggtacagagtttattttttccctgtagctatttagttgttttagcatcatttgttggaaaataaaaattgtctcctttcttcattgaattaccatcagttgaccaagggtgtgtgagcctgttcctgttttgctctgtttggttcagcctacctttgcctgttctatgcccgttccatgctggcttggttaggtagctttgtgatacatcttttgttttgttttgttttgttttgagacggagtcttgctctgtcgcccaggctggagtgcagtggtgtgatctcgactcactgcaagctgtgcctcctgggttcacgccattctcctgcctcagcctcccgagtagctgagactacaggcgcctgctgccacgcccggctaaatttttgtatatttagtagagacagggtttcactgtgttagccaggatggtctccatctcctgacctcgtgatccacccacctcggcctcccaaagtgctgggattacaggcgtgagccaccgcgcccggcctgtgatacatcttgatgctaggtaatgtgagtccatgaatcctctaaatttatttatttttgaaaggtttggcttctatgtctcttaagtttgcctattacttttagaattcaggtgtaaatttctgcaatgattcttttttggatttcgactgggagttcattgaacctggttgtcaattttgggagggttgacatcttgatactgaagtgttcagttcttggctttgactggcgtctgcatttgtttgggttctttcattgtcctcggcagcgttgagtggtttttcagcctggaggctttgcttatctggcagactccatttctaaatactttgttcttgatggtattctaaattaggttgaaactttttaaccttttaatttattgctgcttgtgtttaacaactgacttgtatgttgatcttatattctgggatcttgacttaattcatgtattttttccagggttgttttgagattgcttaggattctgtataaaaattcatgatgtctatgaataaagacaataggcttcttcctttctgattgttatgctttaatttcttctattgagctgtccagaaccctccaggatgacttcagtaagtgtggtgacaacagacgtccttccctgtttcctggyttgggggagcttgcaggatttcaccagtgaggacttgctccccatgttgggtttcagaggcgtcttcctcactgtgtggaatttttgtcaaatgatatttcatgtatgtgttgacatagtcatgtgctcttgctcctttattctttaaatttggtagaataaatttttagaattttaaaccaggtgtatacttttctttttttggtactgtctttgtcttgttttggaattagtctcattctgatgacagatcaatttggaagcattccctcttctattttctgaaagagttaagtgttggattgatattactttatctccaaattttgggatgaatgcaccttggatgccatctgggtctggtgtcagaagccttttgtgaagcttcctggtttagtagaattgggtgctgccttccctcatctcggggtgctcccacctggagccatctgtgctctgtgtggctgctgtcctctggttgctgagtgacagtggctgctgggatttggggcagcatcctgctggctctggcccctgccctcacccttctccgagtgcctatgagtcccagggtggtccttgcttcctctgaatgggtgtttctttagtagataaattacaggttgaccactgggccttcttcagtgacattgcatctgtgcttgtgtacaaagtgtgattcccgctccccaggtgaatccacttacctgtgtgtggcttcgcacggggaccaatgacttccttgcatagttacctttccctccctaaaaacgtgtgagaagcacatcagttgggaaagtggtatattttccaaaagggaagcaacataagctgcttttaagttagtttcataactgcctgacagtatcaggtttctgtgaatgccatcacgtccaggagcacttggcctctgcaagagcggagcagctcccccgcgccatcttcccgcagctgcagagctctgacctcgtcagattccctgcagtgcccacagtctaatgagaggggccaggctgtatgtgtttacttttctaatgttattttggggcttgtttagttttccataatgttgattgccgtatttgattacttgaaaaaatggaccgtatcaccctgggtcatacttagattacaaaaatagtagcagtaggacttgtagatcttggaagctggggagctaagggggctcatctttcacttaccaagggcttacccttgtttttcattcttttatttttttcacataagccttttcagaaaaatataggaaaagctgatagagtccaattgaactaaaccactttaaaactttttgtattttggaaaatgtggggactacacacagactgtcttctactgcagaggctctttttctgtcttcatggtagggatcyatttacagggtttgtgggtctgcttttggcatctggcccagccagcccttggattgaggctgggtggggcatgcaggttggccctgaccctcttctgagcacctggctggctggacagatagggccttcagtcaccagctaggctggcctgaccctagaccctctggaacgtgagaacgtatcctgccgggcctctgtgttgaacctgggaggagagttgtctgatgtcattggatgccctatgagtttctgccctcgaaacgtgccccatggaaagcgtgaagatgcctttgagcttcccgaagggcagctgcagcaggaggtgacctgcgttttgcctctctcctgctcatctctaaatgtgttcaggaactcagtcgaccctcagccgtgcatggggtcccggctggcttggtatgtgcacctgccgagtctgtgctgccagttatccccacggcctctccgtgcaggtcggtctgaccagtgccagtcggatggttcctcaaggtccacgggccatgagaaccttcctgggaacttcacgaattcgtttttttctgacagattgggaaattaatacagacacttgccgcattcacgttactataattgatctttcaaggaggagaagaaactgttcttaaggacaaacacttagagaagcactgccagtaaaaataacatccaaaaaaacgcgctctgtaggacttttacctgcggcaagttcggctgtctcattgcttttcctcagtgccgtgaaataatgatttgtgttgtatgtgcttaaaaaatgtgattattttactttatagagtgttccttaaggaggtctcttgagtcaaataagcatgtttctgtgaggaaaacttgccaggcgctccttggctttatagaaatcgtctgtttttcaaaaacgaatggctgaatgccctggcgagcctggaaccccttgttcttgcccctgctggctctgcgattccatgtcggtgaggcctgtccacgctgacggatgttgcctcccgtttctgcctgagaggggtaaatgatcagtggtggatagggagttcctcttgtgacttatgttatcaataacacaaattgtgcatatacttcaccccatgctaaacatttatagtgcagtgtcctttagaagccagacaatggcctcgtctttcaggttgatggctaaaaagacaagacaggaagccaaggtgtttcttttcagctccacagatccttgtgatgaattatgttccgtgacgagagggtacgatgggggccgactgctggcccccggacacacagtgctgcacatggggcctgcagaggtgttagcgtagcccgtgatggtggcagctcttggaccttagtaaaataaagggaagcagcataacatatgcttttaagtgagggtatggcgtgaaaaccctgccgttgtgtgataggagacgggctctgcaggctgagccttccaagtcgtgaatgatgaggtttgctgtgctcctctgattggcagctgaaagggcaggtcagagctcctctctacagcactgcggagaatcccaggctgtggagcactggcccatccaccccaggacagagctgcctcgccacagaagagcgaggttctgggattcactgtgaaattgttgtatggtttctgatctagaaaatcaaacctaaacaatgcgcaacctcaccagcttcggtgctcttgatgttttctccctgcagctggttctttgctgacctgggggcagagtagacagtggtggcagccaggtggatagtatttaaacaagtgtcactgagatttagggtccttatgtgctggactcatctaagaaaaaaaaaagcaatgcaaaagttttatttctgtcaattttgtaactgtgttacaaggagacagagatggcaaacgtgtgtgcctgtgtctgtgagtcagaagcaaacttgttcatttcatttaattttaagtctgccaggaacttcttggaaggaagaaaagaatggttgaatgmcagctacaaataggtgagttcagaatatgatccaaagtgtcagagcaaaagattttttaagtttccaacatttggagtaaaagagcactttagagtaacaggtaaatgggttaacttcaggcagagagaggtggatgtttctgcctctctggtatgttaaaataaaaccccttaaatcccctgctcttamtaagtttccatttaagagtcattgggcttcacctctgttcggctctgtttgtgaagggagggcagcttttctggggagatcatgcccctctctcctttatgtggccacagagatcctttccctgttttcatgaggaggaaacatggaaccttggcacaatccagttctcatctagaattacattgtatgctgtgcaggccaggggaggaaagatcccggaagtggcagccaccggataggcacgttgccgccacagccagcatcggcgtctgttcaggtttcaggaaggtcacttcttggctcaaatccctggtatttccaggttgtcttcagactgcggctttcaccctcaggaagccccagcatggccttgggcccagcttagaggcttgtgggggtttgggtgtagccccgtgcacagtatcctgtctaggattcataatcttgcaacagccatccctgatgggattgggtaagatgacagtgtcctttctcgatggccctggtgccctgtggagttgggtcctggccctcactaccctgttgcgtgggtgggccacgcccctcctgctgatcagcctctgttgcagagagtctggccctgtggacccctgcccccggccccaggccctgtgtctgcgctgggcttgcattgcctgcctctcggtcccctcgcctcattgcagtttggtgcttctaattagttgtggtcttgaaaagctggtgaacaggcttgtccacattgtatgggaaataaggttcaatgaacccctgtgagaaacgccaagtgtgggatttctgacagtatcccacagaaacatctcagagcccatttctgtttcctcctggagtctctgtttctcccagaagaggcggcgtggccaggggtcaggcagatgtcaaggaagtgaggactcggagggactggcacctgtggaatagcccctgcttcgtctgtctggcctggtgggaggaggtgtccttccgtcactgcacttcgtccttgggacccctctgtgaagttgttggcatcaatgtgcgtttaccaataagagaaatggagatggggtgagggatggtgggttacaagtcctggggaagacttcagggaagaagtgggtattccctctacttagctgaacttgcagtagagactgccactctgggagtgacttctgttctcctgtgaaatcctctgtgactcttgcctgcagttgagggagcctctgagaccatcctgattgggatttggtcagtgggaactcaagtcagtattgtcctgggggcctgagtgccagtgtcttaaaaatagagtgtcctccaggtaatgttggatttggaagttcaggctcagcactggatttgtcctcgtgatatcactcgcctactgtacacatgagtcattgtaaagttacgacatgagctcgcatacgtgctggtattagagctccttggacggtgatgtgctgttttagaggagaaaaagctgagatgaaacaaaaatggtggtggcagttacccagggccacgtctgtggatgccatcctcaggatgccattgcatctcgggccagcctccctctgcttttgcaaaagcacaaccgtctggcctctacgaccaccaacacacacctctcatactctggaatttgatttctggaatgcttttttattcttcctatatctgtaagattttctgatatttaaactggctgcaactaatgaatagttttcagttttgttttaaaagtgttcatgtcatttaagctctaaactctcacaatatacttggtttgttaaatgtaaaattttatcagtaattagatcagctccttgatattaatgtacagggtagctcttgcgtgctgatcagttcagaatttaaattgagttaaaggttaaatgagtttaatttttgaattgaactgaagcattgtcttgtggcaaattcatccagaatttttatttccagttgctgtacaagtgacggaagtgggtctttttgcgataaaaacattgtgaatacatttaggattcagtgagcttctgtcatttactcgctcattctctaaacgtgtgagtgccctgctcygtgtcagaccagatggcaggccctgcatggggtggggaggggccagaatgtgcagccccacctgcagcccaagcccagctcaggggcagacaggggcagacggggaagtgggctgttccacaccttgagattggtgaattcctcaagacagcggctggcaggggcccaagcctaggtgactggccacagagctgaatggggctgaccgagttaggacatcactgggtggtgaaccaggaggccctggctgctgacaggatgtaggggcatggaggggtagcagaaggaggcagttaagaggctgcgagccccctcttgggcatctgacggggtggtgcttcctcccagggctaggggagaggtgagcaaagaataacctcaggaaaagaaataaaagacctggaggaacagtttaacaagtgggtggccatgaagagctaccaatggagactgaaggaaaaccaagaaggaccagagagagaatggagccaggaggctggaaggagagaggcgggttttgtgtcaggattgcccagagctccccggagaggagcatctctcctctccatggcagagcacagagggtggaacactgacgtcagatcttcttcaggccctgaacgtaagaattccttggtacctggtctgctttgagactgacatgctgtgtttgattagtttgacttcgggatgccagctaaatgctgtttgctcagcatatgcctgaactggaaatggttccatcacaaaacaaactgaatcaaatagaacgtgggggtggctcagtggggacacagagccagaggtgagtctccttcaccccaaacaccccaagttctagatttgttcttggagctctgtgtcagggttggggtggacaggagggagagaatatcctccgcagaaacacagtttatcacactgcagaattcttagtgttcttctgacaaggacgtttgttcagtttccctctagactgggccatgctctctaaatagaactgaaatcatagttacaactcaaaggcagttgagagaagagttctagctttgttccataacgtcctgtgtcttgatttcactgtatctgtctgttcatcctgctgggggcgttaacccacctcttctcgtacagggtcatctctagtttcactgaggacctctgagaaccctagtccctctgtccatacacatcggcaggagactcacctcccccctttcctcctgtaccccatctgatccacatgcacaaaacacacacatgcaaatatttaaaagtagaaaggcttatggactgtatgacttcagtacacctgcagattcatggagtggttctggagaacattggtccttctgccggcctggcagctactttaatttctggtgtccattggcagaatacaagctcatagtgtgtgctgggggctgggtggggcaggggattaccgttttcttgcagtgattgttcttgatggaatccacattactgctttcaaagctgcttttcctgtgccttcttccagaaagctatcctcccgtccttggttggctggggcaggtgaagcattaggaaatgctctgtctctgcattctcttcgagtaacactggggagtgttcatggcttctggcagaacagcaatgttagccttcagctgctgaagcaagccttctgctcattctagaggcatcttctaaacagatctgcactggtcaggtggggctggagaaggactgggctgagagcacagctatgggaggcaatacttgttcttgttcccaagaagctgatgtgtcgtccggtgaggtctctcgtcagccgaaggttggcacaaggtcgccaggcaagggctttttgtatgtgaagtatgcacattctagccacagagttttctgccagggtgtttagacaagctaaaagtggaatataaactgtattcaatttgctaggttgcaattataaggacaaacatgtttttaagacttaacccattatagtaggaaaatacaaggcttggggtatgctgactctttcccttgttcgtctctcaaayagaaaaatggtgtgtgtaagtaggtgtttgtatatgtacattataagacattctagaaatttctgtcctatttctttaatattcttgccactaaaaatatatgctcctgaaactagggaaaaagaaactgtttatcattcttctgaattattacagataccccaaaagtagcctcctccaaatagtggtttttcttttctaaaaatcacctggaaaaatactgagctttctgatctttattttatccttttcagtggctctgtttggaagagttattgtacaacccagcactgcttttattaaaaagaaaactgggccactyatttccttcaaagtttttggtgtgtttaaatcttctctaggtaaacaaaacttttattgaaaataatattttgagaccgtgacacccttctcacaagaagcggtgctgaaagcccccttgttggctggtcctgcaggcagcctggcgtctgctttgcctgtgggccgtgcagggtgctgggggcagtggggagaggcgtcagtcccacctgcagctttcgggggggtgctggggaggcagatttgacatgaacgcaaataagtgcaaggaccatcagggcaaagagacccaggagaccaggccaggggaggaggcagagagcctggtcaggccaggctggtcctccaggtccaggccctgcaggatcctggaaggcrtgaagatgggctggaggtgtgagcaccaagaatggggcgcggcctgaccttgggtctctagaagttaccctgtggtggcattttctataattgatgtcataaatagctggcttctttgttagaattcatttacttactaagtttggcaaatatgttgaaggaaagaaatgtgagtgtgtggatggatttcagcacgttgacatcagtgcctgtctccttggtgcctgttggagacaccgtgttggaataaggatgaggttcctccctcagaatggttgatccatttccttcagttcttcttcagttttgcagcttttctcccctaactgtagcagaccatctcctggaatctcatattaaaggcataattaatcatgtgatatcctctcgttttttgcatcagagttttcaagagccctccagatttttattgcctgcagatccgtgtgcttagacatagtaccgtcagcagtaaactggcttctggagaagaaattgacaaacaactttatagttgcatttttagccttaatatctgagggcgagaagaatgttcaggatttatgaagttcctgaatttaaaatataagcaataaaatgttcctaatgtggggtccccatctgcatctattattacaaactcttaaagtcactttagcctaacatgtcaataggagttttcttctctttctcttttctttttgacaaattgtgtccaagcaaattagtttgcttgcatgaagcgtcatctgtgtttgcaagctggaacagttttgctggttaagcagtctagagatgataaaattttttgtccgagtatgactttggtggtgaatttaaaagaatcacggccgctgctggaagctcagaggagaggtccattttaaagggcgtctgctgcactcagcccaaagcgttacggggattgtttgaattgacaaaatgaaaatatgtattatattttctctttttaaaatccatttacagtttatttgtctgatatggaggagcagaggtataaattacagagaaattgtcatcatatcctctggatgataagtagggccagggcttctgtttatttcggtggttggttacccactcaggacagtaaaatcacaaagttttagctaaggaaggagaaatcccttctgcctgtataataaatgttgttttgacccaactacactgtttcttgtgataaaaatatgtcacttaaggtttcctgcatctgccatttgtgaacgtacagttgagcgacattagttggtgccatctgtgagtgcacagtgcagcaactttagggggttcacaatgttccgcagccatcaccgccgcccagcactggcatgtttcacagtgttccgcagccatcaccgccacccagcacyggcatgtttcacagtgttccgcagccaccaccgccgcccagcaccggcatgtttcacagtgttccgcagccaccaccgccacccagcaccggaatgtttcacagtgttccgcagccatcaccaccacccagcactggaatgtttctgtgttttgattctttttttttttttttgagacttaatctcgctctgtcacctaggctggagtacagtggtgcgatctcggctcactgcaacctccatctcccaggttcaagtgattctcgcgcctcagccccccaagtagctgggattacaggtgcacgccaccacgcccagctaatttttgtatttttagtagagatggggtttcaccgtgttgccaggatggtctcgatctcctgacctcaggtgatccaccttccttagtctcccaaagtcctgggattacaggcgtgagccaccgtgcctggcttcatctccagaacttttctgtcttgcagaactgaaacccgtacccattaaacactaactccccatttctgccagcccatcccctggcacccaccctactcctttccgtcttgatgctaacacaccttgtgtgggttcctccaagtcaagagaaggagtgtccaaagacccctgagaccagaaccctctgccaacgttggtagtgctgtttcggcctggagggcaggtgggcctctgggcacttcttygtcaggacatggagccatttcgggtagggccctgggtctaccctgtcccagccccgttccctrtcagaaacccgaggcccagaggtgcagggcagctgcagcaccagggtggacagatgttgatgatcagtgggaaggaattcaaagaaatagaacattctacacaaatgtggggaggtatctttagtaaaaacaggacccaagtacatgcaaagtgcactgtgagggagagagatgctctgaagaaaggcactgtttttacattaatgagcatttaaatgatgctgggttaaccatttggctttttgtaccttgtcaccatctcctttatggtgtgattggactttcgagagaaggtggaggaaggttaatagataggtaggagagttgcaggcaggaaagacagaaggccccggggatgataggtggggcagagggagggatggagaggtgacttcaggaagagcatcagctgccgcaggccagggcaccctcaggaagcaggccccccatgcttgcagctgcccccgggagccctcatccccagtctgacaactcgaggtagatctgggttgctctttattttttgatgatttttgcatagtttcaaggatcagtgtcttctacactgatattctatctctgtaagtttctccgaggtattttcacctgtactgacattgtagtctttccttactctcttatttatttatttaccagaccccaccactgggtgcagtgatcaaaaccaaaatatcaaaccagcaccagaaactcttcagcagaccggtggaacatgccttagagaaagccagaggggtcaggcatagcctcctgtgcctggcctgcgctcgcctgggaagggcacccctcgctgtccaagagtgaccccaggccacagaaaccacgctgagtaccaaaggcgagtccccagggtgtgggcaggctccttgctggcatgttcagcccaggcttgccggaagtggggctcaggctctgtctgtgggataatgatcagaagcttggcagtcatgggaccaggataagaagaaccaaaggacagctctcctctcatggttatgggccaaaaaataggtgattgttttaactgtggaaactgacccactaagggggacctgctgagaggaaggccagtggggccgcagacaggaggggaggccacagccgcccacccgctcatggccgagcgccccgtttcctgaacatgtgggaggggcaggctccccacatgggaaccactgggccgtgactgtggcgctccagctgctggcagtgcacacccggtggggccctctgtggcttgagctgcgtcaccatgacgctgcatgcccaggtggtcatccaggaggatgactctgtgcagacctgtgtgcccccgggcctgggcctcctgcaccccagaggtcagtgacagtggaaattgccacagacgtgggtttgtggccttcaaagccttcaatgtcacagaattctgagtctttagctaaattaagtacatgttcacgtgagtgtgtgatttctccatgaggactgagcctcatagtttgtccctgtaccggtgtcagttcatcgctttggtcttggtggagaattctgcatcgcaggcacatcgtctggttagcgggagacatgtttggccagcggtgaaagactgccttgcccgagttcctgagacttcggggctactgatggcagggagaggctggccgagggcagggccacgcggtccccttctgctgatgtccgtgaggactgggcacagctgccagagtcaagggcacggaagtgcaagcagtccgtccttttctgaagcctgctctttttgtttttccccacgtgtgtcaccttttaacgtttttttcctggctttttcattaatgtatgtaaaaatattaaaagcccttgtatattacatgaaaaactatgtcagctgccttgcttttttctatttattaaaacttttcaagcagtaaaaacattttacttgttaatgagggaaagtgggaaaattaatgacatagagcttggatccaccacgatgtctcctcttaaccatgcgcagccagcttcccaccgcatggagtttaatttctgcgatagggttcagtaagcaaatgcaaatagatttaatgatttgcatcagtagatcatttctcagtttaatatcctctgatattttgggtcaaggactctttctttgggagactagtataatttctagaggtagaattattaatattagtgatattacattatgttgaagtgaagtgagatagatgtatcattttcacaaagtcagatttctgcgtgacttttattcattgtggtrcaaaggaaaccctggctgctgaagtagacttaggagcaggcagaattcctggacgcaggtgccttggagtgaggtgaccctctctggcccccagcaccttgcgagcagtggtttttgcatctgttcaccagcgcatgtgaacctgtgggcccgggggacacgtggtccatttttgttgagtacgttcaacaaaggaatgaattaaaatgagaactcttttcagcaaacgctgatggagctttctgtgtctcgtgtgtggcaccatgctgacggaatgacgagaaaccacaacctggcctcaaggagctttgtctactgcgggagacagagatggtggcagatcagtcctggaggcacaaggagagagtggtagaaatacacaaaaggcattgaagaccagtggagcatcagggtcactttcacagggaggaggccaggggtcttgttgcctgcctgccccaaacgtggcctccattccttctttctgtctcccgctggaaaggctgagygcaggtgccagctctctctgcctcactgagcgggtatgtgtgagaagcgtaggcctactggcaggctcctggggaagacgtttctcccctgatacaaagagcagcatgaggaagactctcccggctccccagtctgcggacacagttgtgtgaatgtgattgcaggagggagctgggcagctgttatgtgaccatgagggcgtgggactggggctgaaaggtggcgtgctgccaatgagaaagatggggagagctgggcacctgctggccctgtggccggccaggccgcctctgaacacctattctgtgacctgatgtgcatcctcatcacacactgcagccgtgagcagcacgcaggtgatgacgggtcatacgccatctggggacttgatgctccttttagcaaatacagaaagtacaaaggaaataagaatcagttccattaatcagtgatagtcttttggtgtaattccttctagctttttttttgttttcatcgacatatttaaaatcagttttgaattctacttaattttatatcttaagcatttttcttgttctgacatctttttaagcatgatttttcaaggtctgtgcttggttctttgttaaggcctgttgcgtggttgtacgtggtggtattttaactgtctatgtcctggtgaacctctatgtttttgtttctgtttactgggctgcagtaaacagtctcgatgaacactatgtagccctgggtgagtgcttcctgagcaagcttgctttttggcctttctccctgtagcttttttgtctgtaacacccctttctgtattgcaggttggcttctgaaatcaaatgtgaccctaagtgactcctcactgtttttaagataagaaagcattagctctgtgttttcctagcccctccgttcttgtacttagacccttcactctgaacagcaggtatgccagcctgtacttcctggcattattacccagtggcccatagctcagaagtgacattgtgtggtgtgaacgctgtctccggagcgagattcctaactcctctactttacagctataaagtggacaaatcacttcactccatgcctcagtttccccaggtatcacacatggggactataatagcatctaaccacatagattgttggacaattaaatgagctgaccagcaggaaactcttagaacaacgccaccccatagtaagcactcaataaatggcaactgctgccgttgatgaggatgacgatggtgctatttctaccacttcctaaggtcgcccctgcgtgctcagcagccacctccaccctgccctacccgctgcccacatatttcataggcctccttagatgtccctgtctttgagccgggagccctcgcactcccaggcttgcttcagatcccttgcctgagcctstccagcactttgagcccgctctgcccgagcgctgttctccttccgtgccgtgctgtctgctgtgagtcctggagaacagggaccatgtctatcttgctggccttagtacccctcacagggcctagcccagggggcactcaagaaattgtaaagatccataggccgggcgtggtggctcacacctgtaatcccagcactttgggaggccaaggcaagagactcacttgaggccaggagtttgagaacagcctgggcaacatagattctgtctctacaaaaaaacttaaaaaaaaaaaattatccaggcctggtggaaggcgtctgcagtgtcagctactcaggaggctgaggcgggaggaccgcttgagcccaggagttcagagctgcagtgagctgtgattatgccactgcactgcagcctgggcaacagagtgagaccctgtctctaaaaaaaaaataaaataaaaaataaagatcctgtaagtgaagggttagaagagtggaatatatgtgctcttaacaaagaatggtgtgattatagagatgggaggtgaaaagtagcacgaattccaagttttattttcggcaactccgtcagagtcctgaatgttctttacccagtttctcactcccactgggactctctagggccagcgggaaccctgcaggcattcggagaactgagcgctggctggacctcctcaaaacggggcaccctccagggagctgtcgaggggctcttctgcctcttcagaaaccatcatcagctgtgaaatgtgggcttccaagtggttttgtgtctcctcagtttacagagtccatgtttttggtgactcttgccttggaccctgatggcgctggggggtttcatcgccatttaaccctccgcgtctcacagagaccaagcagtgctttcgggatcgctctgttggtctctgtgtagcacgtggcccccaaaatttaggtgttgaagtcctcatcctcagaacctctggatgtgacagtatttttgagatagggtctcttagaaaggtgattagggtaactcagggtcattagaggagcccctcacccagtgtgaccggtgtccccatgagatggaggttgtggcacagacacacrgagggatggccacgtgaggaccctgggagaaggctgccttctgcaagccaaggagagagcgccttggagaaaaccagctgtgcctacaccttgggttcagacttgcagcacccaggctgcagggcttcgtcagggcagccctggcggaagaacgcagcctcgtcggtgggtttggtgatgctgtgcagttcagctttaccrtcttgctgcagcgggaacgtcctgctgtagaagaggcgccgccatcccagacagtgttcataaacaccgacggcaaagtcaggacgggcaggagcgttctaggcaaatgatgaaaatggtattttacacatatttgaaaagaaaggtttgagaaggcatccattattaaaaccaaattcaacagagaatttaaaaactggctgtggtgagcaatgttagtcccaaatcactttttcacaacttgtttctgttctgtcgtagggctagtgagaccrgctttcccttgagttctggggcgggacgtggaatgtttgtgaggctacccttcattgaaggggggcccgtgatgttgagtgttcaccgtctttcagaacgtttgtgcggtggcgtgtcccttctgtaaattgctgtgacctgggctgcatgctccacagtcagactcgcttcgccctcttactggtcttcattaattcgtggtccctggagtggagcgggaaatacagatatccacctcctctcattatccaaatacaataacaaattacgaagcatcttatcctaccaaccattatcctatcagaaagcatgtgctaatttcgaggaagcaagaggaactatgtcagatgtgccatgagatgtaaaatgtactcgccctgtatcttggtcttctcctagcagtatcttgtctgacaatctccttgtttaacttcttgggctttttctttgacatcttcccacctttccctaagggtttaactgtcttagatctccttgtctgcttctgcccgagactctgggtccctgtcaactcgggtagaattttattggtatttttaggctctttaacatactttaatcattgtgttgctgcatatatttcttctaagatagaagtaaattgtaattgtcctcagataataacctargaccttaaaatacacacaaatgtacacactaatgaattttgtaaatattacataactcggtaattattgtttcaaattagataatgcagaaatctctggatttttatgtcggtgtttataaagcattttaatgataattggggaagttggttgtgggtttttagctagaacaggaacccattataatttttcccaattataataatgggacataagcctctgtaacctgaaattttcctctatgacatgttttcagaagtagaattattagatttgatgagtgtggatgcctaggtttgtagwcaactttttgaactgagctaatcaatgcatatttgggaagagcatataatccaaaatattgggtctacaaatgtaagattgcctttggtgatgagttggtgtcatctgtcttctgtaggaaatgaagggcctcttgcagtgtgctgtgcctcattttaaacctttaactggcaagtggtcctgatcttccctctggacagctgcgggaagaggtttcccggtttaccttggcccccgtaacaccacatcatcccacgtgtgcgtgaagagcccgcacaggccccctgtgcgcccggggtcaggtgtggatggggtcggggtatttccagtacttgcgcttcggagtctttttaaaattgagagctcatctattgttgataaatggccaaatataaatgtataacaccttgattaataggctgctatgaaattgaaggtggtcttttctaggaaatcctcattgaaatactgcccattttgaataagtctaatagtacgatgaaccacacccttagtggaaacgttataggatgcaaataggaagatttgtgggtgtttttccttcatgaatttgttgttatctttgcagaagtgaagaatatcaatattttatggcctttctttgggattcgtgtttattaccagtgatgcagagcgtggccctggtcctcagcgcctctgcctttgtggtggcgggggccagtttgcctggtggggaggtgtgtgtgttttcaccaagttagcaaatttcctgttttctcttttaaaatggaaggctagcttcctctcccattggctttttctggagattggaaatggtattacagtctttgttgtgttattgtggaaatctccggcgtctctcctgatsttgccgccctgcacggccgttggagagtacttgcaggcagccccgctccacaccacttttatcatcttcattttcattcttttgtgaaaatgtagttgctttggagcctttcgaaaagtgtgtcagatcatttttgccatttctctttttccttttactttctgttattttccatttcgatctcagatacccttcttaggaagctgcatccccgacgccgggctggtctgttctgctctgggggcggcgtgtgctctcatttcactcccataatcagctttggcatatgggattcagagacgcagtgcttggtcttctgagatgttttgtgcagcagctaggtgatgtcccagttctcctggaatatttgcatcgaccaggatgctgtttctgcktcggaacgtggtgtctttgtttayccttaggcattatcttgcttgtttacctaaatctttaactctccttaggtgagtgacttcactgatactaagagtgattaaaataatgtgatgtatggagtcaacttaggcaatacatttacctgtacaccacacgtccaatatttattcagaatgatttttttcaaatatttaataagaatgaataattgaatgtactatagccttcttactttgccctgcgatcccrtaagacctttraagctaaaactagtttgggcccttgaggggtttatagaaattaggtatgtctgagtatggaaatggctggcatggtgaaagaattgagtccttaagtaatttgctattcccagtgataattagaagaaacccctgttctagctccattttcccattttttttaatgttttaggggagatttctttaggtattagcggctgatcttttttttcttaccatgtactcccgctgtaaggtgagtggttttggcatattgtgttgccttgatgggttattaaatcgtcacttggaaggatgaatgtgggttatagagtatgytgtgccatrtatcatcttagtcatcaggaatgtttcagaaaactgaataagartaaagttttttaaatttatgattgaaattagcaattttattaggtccttttaaaaaaacctacaaacttttaaagtttttctcaaaatatacatctttgttctcagaagaggtctgcagactgccctaatttgtcttttgaaaggacacagaattttagcagaatacttatgctgcagaaatggacaaatgcaggtgctgttccttggatggtcagcatggaaggttgacgtgctccaagatttactgtgcgtcaccttagccatcagtcccatcgtattcatttaactccactaataagaaacggagcaraagtggaattatgagttcagtagtattctatgaaaggtcagttgttaaaaaggcagagtctgacattctgtgaaaaaggtgccttcattaatcattctgatgggagagcacggggcgttcttgaccaataccagtgaaccttgcaatgcaaagtttcagggtctgatgtgtaagttcttatataaaaacgaggatcgtttgaatatatgttgagatcattcaaggaattgctttacctttgctgtttaaaagtgtgtatatgatatagaacacgttattaaatgtgcattactgttttgaaaaaggaaaaacacctgttaattttatagataaattatggaaatctgtggtagacacagctccaggcagtaatgcatttccaagcgaatgaatggacatttcctatatggatcatytacagatattggtaaggtttctttaagtctcttttgtactctgcattcgtggctaaacctatgcactttgaccctgttctgcaaaacaaaccatggcctactttcagactctccttcgttcttttgctgttggttacggtggcagagtgcctactgtgtacacagaatctagacatttcacattgaattatctgagtatttatgtgccctgacaattcagcgttaaagttcaatacaaatatataaattattaagcakttaaccagtgacacattcatcagctgaacgtcttttattgtggcctgtagacagattattttcattcagccattaaagcacaatattgtcgggtgaaattctgtttctggattttctttgtctctgttgctgctatggaatttcattgaaagcatygaaatatgagactaacacagaatactgagtgtttcttttcagaaacgggaactttcagacattttctctccagctgaattcagtaaagagcagtgtgtgtgtgtgtgtgtgtgtgtgtgtgygygyrtgtgtgtgttcctttcccagccagcagtgttatatctgaagggaagggtggggatgagctgtggtgccgcccttcacgccattgagacgggctgggaaggtgccctttcaccctctacctgcagttggtgcctagtgattttaaagattcaggaatgtctttcaccgtgattctcactattaaccaatctcacgtatctaactttccttactatattattagttactactttctatacaagagagaggtggagcctgcctgtgtcacgatggggaaggcccttgggattcgctctgtgggtgcgggcagcgacaggggtgggtcagggtgcaggyggtgagacggcgagcgaggaggtcgggaaggagcctccacaccccagcagggcccattccacacgagaccccagacgaggggagcagaagctgctggtgcctctctgttctttgccggatgctaccgttgtctgtggccacacttgcttcttcaggtgtggaaatagaagctcagagaagttaaacaatgcgccaaatgttacaccttcccattctaacgattttgtcaatttcggtgtcaaggtgatatcttgtctgatggtggaggtcatagttgtctgtgaggacatggtatccaccctcaagcatgtaattatgcatggagagggctcagttcagttttaccgagacacagtttattggagtctacaaatagcatraactgctatgtctgcagtgttaccattctctttccttattgtcataatttttgtttaatggctgtttgtgctacattgaccaggtccatgggttgcttaacataaatgattacatttgcttatgattaaaaacttcctccattagaagcactgcacccaggacttgtaaatgatttgttgttaaagttttctacttcattagccacgtcgttgactccagagtcattgtctaagagttaggaacacttgtaatgagctgtataatatggaccctygaacgaaatttaaaaagagaccaagccttctaggaacagcttagcatgcagataaaaggctaggaaaatgtgtgaacagcgccaggctgtaggctgaggcacgttccattctgactcagaatggcatgggtgaataaagtcttttatgatggagcaagacttgttgtaaaaaattatataccattcatgaccaaaatccttcaaaacactccgtcaccattcccytctgaaccctatagcttaagttctaagcatcttgtgagtctcttgatagagcgttgaaaactccatgcaatggtctttgggacgccattcgaacctggcctgccccttgctggcaccttgttcgtctttggctccatccggggatttgattgtcagtgacccacctgattacagtgggctgccatggccctggcctcgtggtacaaaaacatggacgattttgtgatttattatcggaggacagctagcaaagagaacttcctggaataactgcattaaatgtgatgggcatttttgtgacagatgtaaaattcttaatcttgaaagcagttgcatgtgtcaggcagactgggtgttaattttctgacagcagtaggaggagctttttttccccattacagatggaattaggtctactttgtacacagtactttgtgacagtgactctggccaggggaggggatatgctggttctggagtctgagaagatggggctgagccagctgtgactcggccacacgtggctgtgggacttcgcactgactacgcagcctctgccaggtttctttgtaaaagtgaagttaacaccgatctcacaatatctggggaggaataaataggaacacacatgctgagttaaagtcctcagttatttcgtcttcagcgacagatgatccccgacttaccgtggttcagcgtttgagttttcgagctttatgatggtgcagaagcagcctacgtgcagtagaaactgtrccacaagtgcccgtgccaccattctgcgtctcagtacagtattgaataaaggacatgacacagtcaccactttattataaaataggctcgtgttcactgatgctgcccaactgtagctaattcaagtgttgtgagcacgtttaaggcaggctgggtggaaccatggcgtttggtgtattgaatgtgttttcagggtcgatgtttttaactttcactgaatgtatcaggatgtagccccatcataagtcgaggcacatctctgtttgagtgcctgttacgtgctggccatggtcccaggcctgcgggatgcagaggcgaggacagtgtttgagtttctagcgtgctcactgtgtgtgggtaggatgaccctgccggtctgtgccctggcttagtgaactagatctcgttggtgtcctgaggccgagtcttctgtggtttctctggagagtgtggctctccctggtcagtattgtgacctcagttaccactttctgtcccctacattcatatactcccattcatgtatttaacamttctttactgctgtaagataaatggttttcaattatgagttttgtcatgaaaatttaattttttwaaaaaaatcaaaagacctggatgtggtgtgagcatgcggagctcccctttctgcccaggcctttaccttcctgctaggaggcaaggtcagcccagggacagtgctgggagagagcggagttccgtcgttcatgggttgctaatttttggagtactgcaatacaattaaatatacttaaccttaaaattacccagaatgtgattgaatctgtgattcacaggccccttctggttctcccgtgcctcggtgtgatcattaggaggatggatcawccyggtgctatcgggaacgcactgcgttaatggcctcagtgcccagcaatggagaactttccactgagtatccgcatgcagcgtgcccggcggaaggtgaaagcttcaccctttgtctcccttgccatcctttggccttgtgtgtttggaagtagccagaggtggtggaacagtggtgggctggtttgggtcttgttggcagtgccaaagggacaaaggctggatgtgggcacgacctcagcctcgtgatgggcaagacaggtgggggtgactttctgttctgaaaatgacctcctccccttcttcctcccctcaagcttcctacctttcctccccctccccctcccttcttcttccactcccccacttcttcctcctctccccctccttcccccttccccctcctcttcccccttccccctcctcttccccttcctcctcctcttccccctctccttcctccccctccttcctccccctctccttcctcccccctctttcctccccctctttcctcttctccccttcctcctcctcctcttccttcctctcccctccccctcctcctccttctcttcctcctctaccccttgctccttctcttccccttcttcttcctctctctccccttcctgtctttccccttcctcctcccttcctcctcccctcctcctccccttcttcctccacttcctcattttcctcctccacttcctcatcttcctcttcttcctcctcattattttcctcctcctccccctcattttcctcctcctccccctcctcctcctcccctgcttcccctcctctgcttcctcaccctcctctccttcctccccctcctctccttcctcctcctcctctccttcctcctcttcctcctcctcctgcccttcttttcctctgtcttcctgttttcttccctttcccctgctgtattccttcctcacacgcccccctcagcctcttttctggggactggctcttctaggaggcctgcctcaaggccctcaggccagttcccggggcagccactgagcagaaccgcccctcccagcgcccacctatggccactgccctcagggtcccttcctccagcatggtgctggcggatggcgccataaacaggctgtcactcatctgcaggctgccttgtctttcccccagcagattaaagccttcatgaaaaaagatggagggcgcttgactttgcgacacgcacattctgccgtcttgggaagggggaaagaggggcatctagctgggcgctgcgtgtagcctgcccggcggggccggggtgtggcaggaccgaagcctgctcctcgtgtggggcccggcgcgaaaacagcttgtgcagccgctgagtgactgaggaccgtgtcccagtgtagtgtcatttcctcgtacatgtggagtttaaagaattataggtaccttgagctactggcaggtaaaagacagtaaaaaaaaaaaaaatagtgaaagacacagtctaccctctgaactgatctacaaggctatgaaagcatcactttgaataatatgcagtagatatgttagaaaaatgtaatattggtgtgtggacccctcagcytctttgacgagtgttgtaatatatcttgttgaatgatgaatatgctaccgtatgtttcaactattcctttcttgtggctgaaagaaaaatatattgaaaatgaatgtaaaatattgacatttagtagttgttatgctccactgtaatttcttgttgctttggatgtggtagacacctcactaattacacggtgtgtacatgcgcacctgtaacaggagccgcgtgaaagtctgattggaactctgacttgatcagcccatgttcttctgccatagccacaggagcatctgaacgtggtgatggaagaagaccctggcgccccgtctccccgtggattagcggccctactgtgagatcctggtgatcttgatgatcgagggttatttgaagcagttcattttgtgctgcagttcattgaaatgccaccacccagaagacccctgagtttccagaggtcctggtgctttttttgctggggcttggaccggagcgtctttagagtgaccactgccagggaagacaccgtggtcggggcctgtgattcctgccggggccccaggcaggctggagccacaggtctgagttctgtccagttcaggttcgtaggccactcttgcagctctgttccttcttcagctcctctggtcattcacacgtggcctggccacttgcctattgtaccagctctccagggctggggacttgctagagcagggttcccagtgcccccaggctctactttgctctgcctggtctcagggtgtaggggatggagagctggacttccagcctgcttcttggctgtctaggtgccaggggctcgggacacagagctcctggaggccgagcacaagccttgggcagaggtgaggcagagctctgactgtttcattcgactacgttgccaaggagatgctcgctcggagtggttgctctggctctgggattccaaaccaagctgccttctctgatgtggccttagtgctctgggcggatgtaccttggctctgcctggaccctctctctcttccaggcctctgtcccaccaggatgatgcctatccagagctcattgtcctctcccacttcctccccgagcttcccattccgtgtctctctggagggcccatcatcatcctggtggaggtgttgcactgaggaccacagcagccctcgcattcctacacatacccctttgcccgtgggatttttgctgtttctcttctcccactgttggtcgttggctggatctcgttgaaggcctgcggagattcaggtgccatagggagggtctgggacttttctctcggaggccccatgaagttggtattcctcagctctgccccagggtccctctgattccayggaggagctgcggaaagtccacatttttgaagagctgcaggctggggagcccccgtggcgaacagaggctctaagagaggggtctttgttttggggcagtgagactgagtggccagtgagcaatccgtcatcaatggagatcaatacccaggaggtgccatctctcttggcgggtgacacgtaactkttacaaatgggtgcctgtccctgtcacgtcaccggagtgtgcgtcttgatgccctggctccctgaggcasctcgtgttttcgagtgtttccattttagagacccggaaaagggatccttagagctgctttgttttcctttttcaccagaaacaaatgcctttgtgcttctcccgcctgcggactcccactgcgttcagcccgtgcgggtggtcatcggccagacccatccagcctgtggcccgtcccctccacctctcacagccacctaggaaagtagttctcagctctaaggggcattgtctgttccaagaagaatgactgctccctgccacctcccacccccatcccatgtccccatcatagacccagcaggacagacccccccagagagccagtggccttcttgcccataactcgttggtgctggagagctgtgggtagcgtagcaagtgccactgagcatcctggaaaccctgggaggggtcccggcgagaaagagccatcaccctaagaagattcaggaatgggatgatcatggggttcagggtgccccaacagtaggttgaaaatcctgtccctggccaggaggcagggaagtagcaaccttattcaaggggaaaaaaaacctcctggagtctagatacagtatcttagtagtaataaaagcacgggtacagatttactggtgtcggagttttaactgtaatactgtggaatggtaggttattttgtgttcaagagctacatttatcacaaaaatgatgatatacaaatcacttccatatcacaaaatgttcttggtcaaaattggcttgaggcaagtgatatcttcgagtaaacagtatatgaagaccatatcttaaaatgatagatcacctaattttgttctgacagaggtttttgccgcaacaaacatctgtcattgaaataccaattcagagatatggaagccaaattgtagaggttttcctggatttgtcactcctaacttaagaatgctactgttcccatcgtagcttttataagatattaggcagtgttgcactttaagagacattaaaacaaaataaacaattcagagaaatacgctttaaatgcaaaccaaccattaaaaagtatagaagtcaggaatgggccgagacagcctggctgtttttatgtgcagacatcacattaagctcgctttacttggagattttgaactgtagaggcctccaggcctcctgccttcacttgaggtttttggtgctttttaaaggactgtgataatgatgttattcccaagatgtgaaggaccattctggtgctgtcctgacaggggagcaggtttacagctcaggacactggggtgccacggggacctgggggtctccttgtgcctgggattcctcctcgtcaggagccctcactcaggaagccctgcacgrgggcaaatgtcctgggattggagaggcaagcgtgaatcagacatttccaaagacgacaccgaagaacttctgctgtattccaagttaaaaactaattgatcttggtccaaactatcataggatagttaaaaaaaacacacaatagaatttctgaggtgcttgggagacattttagaaatatgtcattggtgaccactttttataggctgaattaagaggaaaaaaaggtaaaatatcttttaaagtctccagtttctgagacccctctggagatgatttcattgagttcctccctctgacagctcctatggacctggagggctctggtttctggagtagcatgggagctggccctggtcctggctctcctgcccacctctgcccccttttccctgccccctcctgactgcagccaccagtgcccgccatttcttcctgcgctgcaacagctctggccagtcctctccttattctgtaggttgaagtacattcctggaatccaggttktcaaagcattctatgcagtttcttgcatgaaatacaggagcagcctttcctgggctgcctcacacattgggcttctgtattcctttatgacagtgtgaggcaggcctggctaatgtcttccagcccattcatctccccacagggtatgagatgatgggctttagcgtcagacagctgggcccacactccggctcggccacttacgggctctggcaggttacctcagctgttgaactcgtgagctgtgacttcctcctctgctaatgcggcactctcatgcctgcctcgcaggttcagatgtgacgatagacataaaacacctggcccggctccggcgcacagatgctgaagtcagttttctgaggtcgtggtgggggygggggtgagggtggcaatggaaatagtgacaacagtagttggcgttgtcatcctgtttacggctagcctgcgagtggctcaggcgaatccagcacagccttgtcctcgggttagctgccctctcagagcttcacatcataactagttcatttatcatccacgctagagactggtcttccagaggatattcctacctcagagccccttcctcccgacgtgctgggacggcccctgctgttgcctggctttgcctggtattacaagggacctcaacctcctgtgctcttacccgggcctgacttgggtgatgcccagaatcccagtcatgaggggaccatgactgtgggccagttgctgacaaccttggtgggttgtagactcatgaaagaaacactcctttgcctcctgaccttgtgcatcagggaggatgcaggaggaacggaagattgagcccggggagtgctgtctcggcagtgccacttcagacaagtgagtgtccctttgtgggacgtgttctcaacaggcacaggtgaccttataggtattgggatgatggggrtgtgcctgcaggttgtgaattactttttgccttcagagccaccaacacattcacacaaacatttgttttccttttgattttatcaggagaattttgtttctttgcccgcctgaacattgcttgccctccataattgagtgtagactaactctgcagcctaagccaaagtacatcttttgtctgtgcgaagagaaagttccatttccctttaccaagttatctccatggcccttggccacagcaccctccgcagaccctcacgtgcatggccgcagcagactgcccacacatttgcacactgacattggtcttattctcatcaactaataattaaaccagaatccaagtaagtgcaagaatcaaaggctttgagtaggaacaaaaggctatgttactttgtatccttaactaagaattttgttgttcaagaaatcctgggcttttgttggtgtagctctgcaagtcagcagcacccgggttccacccggtgcttacaggtcacgagtccagtgacgctgattgaggtgtgtcaccaaatatgctgcagatccggggccagcccacctgggcctccggccacggtctgtgcccacgtgtcacgaggcacatcccgggtcatccggagagggacctacaaagtctattttcaaaccaagttattttgtgaaatattgtagtgaacttatcaaaactggtgaagttgatgaagtgaaatgaaaatactgccatgaaaattattttagtgcaacataatgagttctgtttttcatatctggcagatattacctactaaatctaatctgcaatgctgagaattatgccattttttatgatttgtttaattttgactgaaaaaaattgactattcatcgattcttgacctgcgagtattgagggaaaaatttagttaataagaattttcatgaggtgtaaatttaaatgtatgaggattctgcctatcctttaatactatagacattaatttaaaaattctataagggcctgagggcctggggtgtctgaagaacagaacatggaggcagttatggttgttaactggtagacaaggtctgtcaagataatataggaatattttggtgttttccctatatccttggttatatgtggctgagcataattagaagttaaatttgttttagataatctcttcggctgtgaaatggcatcaatacacttaagagtaacaagtcgaatagaaatcagggcctgttgttagtgtatgagcacacaccacacaaagtttcttcttggttccctatttccgcagttcaaagggggttttaaagaagtcataaaaaatgaaggatcctaatattgcagttggagactgagagtgaatgacatattctttacacacctcarctgtcaacatttctaatcaaatcacccagccttcttacttcttaaatgatacaggcgatatttcctgtaataaacacccctaagtctaatgagaggccctaaggcaacttgaaatatatgaattcattataattgaacaacataatctgcagggcaaagatgcctgctacccagctctgaacttcacagagcttgggtgttttatgaaaaatgttatacrttttgtttacaacgtatggctgctgtttgaagtattgtatgttcctgtagtacataagacggggccgcataatggaggaaaaatcaaggaggcaatctttcattttgttctggtatgaaaaattcaaaagactgaaaactcacccagagaaattttgcaagcatattattttccaatgtttcgatcaatttgtctgtcaaccatgctgagaggtggaaggggccagcaaaagcaatttagcttgtgaggtccaaaatagaaatgttttagggaaccttgtcacatgttatttctttatattagaaccgccgtgtgttttatttgctggtcataatatgaagagaaattgatatcaatcatctaagtaagctatgaatatctgatataaatatgacttttatatgcatgcatcagaatacaatataaattaacctcttcatgcatgcaagaatcgttagtgcgacagcgggctccctgttttggatttttccatttgacaattcacggtgcattttaattgattgtacccaagtgacactccgtggaagcatcttgcatgtgaacgtaactgaccctgccagggctttaattaagctataatcttcctttagtcagtgcatctgggattgataaacatatgtaaaccatgctgaccatctaagtgttgctttaaagaaaaaaatggtgcagatatgggagttttaaataaacggctttgatgttacctccagttgaatttttagttgggatttgttaagatcaagttatcttaggagtagttaattctaaggtgaatatacaatctyggtgaaacttgtcctggaaaacctgtaattctgtgattagtctgtgtgtaccccaacactttttcttcaaatcttagattaacactgaatacattaaggttatttttcaaacaggttatagttcagagaaattaatttaaatcagttggcttacagaagacccagtttagttttaatttgccttaacagccagggtcttcctgmtctacttacttagacgtcctcagagtgtcttctgagtagttggctaccatttgcatggcatgattccgctctcggagcttgatatctttccagattttcagaatttagaattaagtgtggaagtcaagcatactgaaagttttttatactatggatgctgataaatagaaataaactatgacaaattaattcagaaatctttccactcagtgtagatattaagttgtggtcatacggaagaagtcttgaaacacgatttacagtaaattatgataatttgggatagagactgtgccattaagagttgttaaacagcatgattcagacagctctgttttttccagtgactgcctattcctttattgtatatgtgtacccaagtgatgctctcacatttatcttaagtccctattattaatatacatttaaagtctcccgaggttttgtttggtttgctttggtccttttttggagtgatttgaagcaaagttaattgtggaacctatttatagacatctttctatacttgcacaagtctgtgtataatcaattctgagaagtagaatttaaaatttagtgctttgaaaattgtcctcattttaattttttggattttaattaggtaaggttgaacatttttccttattttcattgatygtttggggttccttggtaaaatgcttgcttttgtttcctgttgggttattttgtctttttcttattgatatgtgagaactttttgcatattaaagaaagaccatcatttctattttgattttgcccagggaatttttttcagaataagaaattcaactagatttttaaaaaacttttaattgggcaataatttcagatttacagaaaagtcacaaagattgtacagatccttcacccaggatctcccaatgttaacagcttacataaccatagtacatggtttgtcaaaactaggagattaacattggtccattgtggtcagatttttaagtcccttcctatggcttctaaatttatgaggtgcttacacaaaggcctttttaaccttaagattttttttttgttttgcttttgttaatcatatatgtttatttccttctactttttaaatgttgtttttcatattttcatctctatttatttatttgaaatgtgttttaatttaaagagtcttggttggaacctatctttattttcatctaaatgctaactaaccaactttttcagtatcttttgaattactcgactttgtgtttacacacattttacaaggacaacaaaaaagtgcctgctgattgactttgtagtcaatcataacccttgaccatattttttttggtggtacttcatatatgaaagagtataaaatctaggttatttaatgttgttataaaattattctaagatcaccgaatggagaatacttagattctaaataagtgactttgtgagaattgaatttttatatcattaaccaattctaagacattttaaagaaggcagaatgatctaacccaatacttcatatacttagttttactgtggaatcccaagggcaacatgtcccccgacccaacgacaaaataacatatattcctattaagtttagggattgatggagcttgtaattgttaatttgtcacagatgatactgttatttatgcgyagttactgtctccctttggagagtttcatgtgctaaattttcagcaaatagtttgagcctcacctacagcttcttgaccttttggggaaaaaactatcactttaaaagaccttttacgagtgagcaaatatatgcttttctgttttcacagtaactttcagagaaacccactggtctcagcatggcctatgccttggcagccctttccacccgtagcaggttgttctttacctttcgtttttaaggtggcttccagttcataccaagctcacatactgtggcgaagagctttctgagaaacttcataagattttgctaagatattaatgaataatttagtatattgttgcatatatgactgagtatcacatttcagtaatgtttttactatctttaaatataggtacataaatcctagcttggggtaaaaggcattgacattttctcagtaatagttctttgtagacagacctgggttcaatattagctctgccacccctcgagctgtgtcaccagaagtaggttgtcctgtacgtctaacttcagtttgtctattaaaggggattgcaccactgacggcttgatcagggttaaatactccagcattccttggaaaacacttctgtgagcattgtcgcagacttgatgatgtagcaactattttccctaagtttcccactttagaaattattaaaaatattgctgccttcatagctttttcaaaggttttctcttatttctgtcagatctcttacatctaatattctcattcccagcagataattaatctattaagaggcaggctgtgggcccctctgataccagggaaagtgaaaggcaccagggcaggagttctgattctagcaactgcctggccgctgtgtgatctccacacagcatcaaaccttgcagagttctaacagaagtgaatagaagattagtctcccacacaacaataatgggagactttaacaccccaccgttaacattagacagatcaacaagacagaaagttaacaaggatacccaggaattgaactcagctctgcaccaagcggacctaatagacatctacagaactctccaccccaaatcaacagaatatactttttttccagcaccacaccacacctattccaaaattgaccacatagttggaagtaaagcactcctcagcaaatgtaaaagaacagaaattgtaacaaactgtctctcagaccacagtgcaatcaaactagaactcaggattaagaatctcactcaaaaccgctcaactacatggaaactgaacaacctgctcctgaatgactactgggtacataacgaaatgaaggcagaaataaagatgttctttgaaaccaacgagaacaaagacacaacataccagaatctctgggacacattcaaagcagtgtgtagagggaaatttatagcactaaatgcccacaagagaaagcaggaaagatctaaaattgacaccctaacatcacaattaaaagaactagagaagcaagagcaaacacattcaaaagctagcagaaagcaagaaataactaagatcagagcagaactgaaggaaatagagacacaaaaaacccttcaaaaaatcaatgaatccaggagctgattttttgaaaagatcaacaaaattgatagactgctagcaagactaataaagaagaaaagagagaagaatcaaatagacgcaataaaaaatgacaaaggggatatcaccaccgatcccacagaaatacaaactaccatcagagaatactataaacacctctatgcaaataaactagaaaatctagaagaaatggataaattcctcgacacatacactctcccaagactaaaccaggaagaagttgaatctctgaatagaccaataataggctctgaaattgaggcaataattaatagcttaccaaccaaaaaaagtccaggaccatatggattcgcagccgaattctaccagaggtataaggaagagctggtaccattccttctgaaactattccaatcaatagacaaagagggaatcctccctaactcattttatgaggccagcatcatcctgataccaaagcctggtagagacacaaccaaaaaagagaattttagaccaatatccttgatgaacattgatgcaaaaatcctcaataaaatactggcaaaccaaatccagcagcacatcaaaaagcttatccaccatgatcaagtgggcttcatccctgggatgcaaggctggttcaatatacgcaaatcaataaatgtaatccagcatgtaaacagaaccaaagacaaaaaccacatgattatctcaatagatgcagaaaagacctttgacaaaattcaacaacscttcatgctaaaaactctcaataagttaggtattgatgggacgtatctcaaaataataagtgctatctatgacaaacccacagccaatatcatactgaatggacaaaaactggaagcattccctttgaaaactggcacaagacagggatgccctctttcaccactcctattcaacatagtgttggaagttctggccagggcaatcaggcaggagaagggaataaagggcattcatttaggaaaagaggaagtcaaattgtccctgtttgcagatgacgtgattgtatatctagaaaaccccatcgtctcatcccaaaatctccttaagctgataagcaacttcagcaaagtctcaggatacaaaatcaatgtgcaaaaatcacaagcattcttatacaccaataacaggcaaacaagagccaaatcatgagtgaactcccattcacagttgcttcaaagagaataaaatacctaggaatccaacttacaagggatgtgaaggacctcttcaaggagaactacaaaccactgctcaatgaaataaaagaggatacaaacaaatggaagaacattccatgctcatgggtaggaagaatcaatattgtgaaaatggccatactgcccaaggtaatttatagattcaatgccatccccatcaagctaccaatgactttcttcacagaattggaaaaagctactttaaagttcgtatggaaccaaaaaagagcccacattgccaagtcaatcctaagccaaaagaacaaagctggaggcatcacgctacctgacttcaaactatactacaaggctacagtaaccaaaacagcatggtactggtaccaaaacagagatatagaccaatggaacagaacagagccctcagaaataatgccacatatctacaactatctgatcattgataaacctgacaaaaagaagaaatggggaaaggattccttatttaataaatggtgctgggaaaactggctagccatatgtagaaagctgaaactggatcccttccttacaccttatacaaaaattaattcaagatggattaaagacttaaatgttagacctaaaaccataaaaagcctagaagaaaacctaggcaataccattcaggacataggcatgggcaaggacttcataaccaaaacaccaaaagcaatggcaacaaaagccaaaattgacaaatgggatctaattaaactaaagagcttctgcacagcaaaagaaaccaccatcagagtgaacaggcaacctacagaataggagaaaattttctcaacctactcctctggcaaagggctaatatccagaatctacaatgaattcaaagaaatttacaagaaaaaaacaaccccatcaaaaagtgggcaaaggatatgaacagacacttctcaaaagaagacatttatgcagccaaaaaacacatgaaaaaatgctcaccatcactggccatcagagaaatgcaactcaaaaccacaatgagatgccatctcacaccagttagaatggcaatcattaaaaagtcaggaaacaacaggtgctggagaggatgtggagaaataggaacactttaatactgttggtgggactgtaaagtagttcaaccattgtggaaatcagtgtggcaattcctcaaggatctagaactagaaataccatttgacccagccatcctattactgagtatatacccaaaggattataaatcatgctgctataaagatacatgtacacgtatgtttattgcagcactattcacaatagcaaaaactcggaaccaacccaaatgtccaacaatgatagactggattaagaaaatgtggcacatatacaccatggaatactatgcagccataaaaaatgatgagttcatgtcatttgtagggacatggatgaagctggaaaccatcattctcagcaaactattgcaaggacaaaaaaccaaacwccgcatgttctcactcataggtgggaattgaacaatgagaacacatggacacaggaaggggaacatcacacactggggactgttgtggggtgggaggagggggaggggtagcattaggagatatacctaatgctaaatgacaagttaatgggtgcagcacaccaacatggcacatgtatatgtatgtaagaaacctgcacgttgtgcacatgtaccctaaaacttaaagtataataataagaaagaaacaagatgagcttgtggactgtctttcacatcctgggaacttatagaaaggtagttaggattattaagcaactaaaacattttcctttatttttccttccttaccgctacctctcccaagttgtaataatttaatagttacaactattagtacaaatagttttaaaagtctctttgagttgccaccctggagtgtgtatctcctaatgggataatacttaaggcattttataaactttaaagtgccatggacatcagtcatttgtgcatttgtgagcactgcctcatttaagcctgccgtcgccttaatgtactgtgtacattagatacgacttcagttcccttatcccaggagggctgaaacttactgggatttctgttatattgacctaacagattaggatgattttaaaattttactcattttctatattgaattaaaacaagaaattagctgagcattttccaagatggaaggaaaaacggccattgttttgatttctagttatgtaacccattccaaaaattcaaacatgagattacacggagtgctgtattaaacagatgagtacctgctcactggcttcctttcacacagtcgcctggcactgcagccacacctgtgctcacctgtacctgcctacctgtggctgggccaggccccaggagtcccgtgggtcaggagcatggcatggagggtgggcagagctttctgctcatccccggatcatggcagcgtcagatggaactcggcctgccccgtttctgtgcagctgtcaggatgtatggggttttcccatgctccgtgcctccatgcctgcggcactttggaaggacgttaaggcaggacatctttaggagaatgtctttattgactttgtctttatttaccttgggcctggcgctgttatctcagctgagtgtccgtgtttaaaggcgacacatggaacgagcatggctcataattttgagtttcttcttctggagccttactattatatgctcagaaaccatctctgtctgcgtggtatctctcctctggcagtgcagtaggtcacacatcgttgaggttatgagctttggagactcttagacatcagctctcatgttaactctgtgattttgggaaagttgacctatatgtttttgttttctttagtgtgaaacaggaatgccttctgcatagcgaggctgtcagaaaagcccttgacactttctggtcccagagagggcaccgcagccacccaggcctgcccgtgagaggtggcagctctgggaggaacactccttaggccggtgtgtggtactgtcaggtgcttatttttgtttcacaaacttggtatttattaggtgttccaggctttgttcgacccgggtgggagggaggatctttgttggaggactctcactttctaattgcgggtttttgttctgaagccatagggtgtgttgccgtctcagcagggaggagtattccccattaacgggcaggtggcatcgtgggagaagcacctgctgtgcccgggggggcgggactgcgcaggatcagggggatgcgcgggagccagtggtgctgacactgcataccatgtgtcaggagccttggaagtcggcttaaatggtttaatctgatttaatcttcacaaaaaccttgagggataggcattacgattaggcaccacagtagaaactgaggcatggagaggtgcaacagtttccctgaggtcacacagctcttcagagggggagacaggacttaaacacgaggaggctggctccagggcccgtgggctttgagcgaggaaggccttctaggtctagacgttcctaggctggggctcagtgataccctaaagcccatgcacacctcctcagacctggctcctgagaggcagtcctccagagtggcctctttgctgagactgtgagcctgggcttctgtctctaaccactagctacaaaaggatgctggacagacatcctgtacctagggacaccccatgatggcttgtcccccgaccacagacaccccatgattggggataccccgtgaccatggatgccccataaccacagacaccccacaactgggcagctcaaggcagcaagtgccttccttgtgtgcttccgttttgttgaggtctttgttgcaaacatcgtttgttgagggctgccttacccttagaagacatagtaccatttctgggaaccatggttgctgttgagaaatgcrtccttacacgcccagatccagccgctgtctggtcccactgacayggcacaggaatcaaagcaggtgcttgggggatgtcaacagttgaatttggattcctcataaagcaatgttagcacatgacactctgtgaggaaataatgatgctactttgtaagataagaaaggggaaacagctgcgttggtggataattgttaacggtgcagctgcagtgtgagttgcacactggaaggtgtttgccgtgacctgtcgcgggctgagctttttggtagcctggcattgtggtggatgcctttcattccatccgctgtggctgagttctgctttcctgcccctggttctgcagtggcgtgactgggctgcttacaggccctgtctttccaagccaccatttaattggggagggctactgacatggcaccattgaacttgagacctgccwttcctccggtggcagtccttggagaacagggccccaggtctttctgaccccacatcattggcatggtctcgcagccaagtaggttatgttttctgaggaaatcatcatgtcattcccatctactgttaatttttaaaaagctgtgattcctgatgaaacaaactagagatgatgcaggaactctggatctaaatggtcagtcactatcttctgcaacttgctggagtgcagacacgtctcagaataagatattctcagactagtcagaacattgtttcctttctttaaaaaacaaaacagaaaaccactgagcccagagttcaaggcctcctaaagaggaagagggctttggctacctgcagataagaaaggttttggtggtaatgctcaagtgtgagttaggtgtgggcgtgagcatgcccagtggccgtcccgtcctcctggagacaaaaccatttccggggtatcccctggctaagcatttgaaagcagcaatttattttcaacagtttctatccttaatatttaaaaaataggaaagtgtactcaatcagctttctgttgactttctgctgcctggccggcgtcttgtaggaggcgctctgcctgtctgtgcaggaggctgtccagggtgtgcgagccacgtgggccagcctctgtgggcggactgtcccaggtgggtggtggtgagggggtgaattcctccttcacatttgcttacaagtgctccttttttgagtgttgggagcacatctgtgtatgaaggacatcattcggacgctttccagggtggtgggaagcagcctcccttagcccggctacgtctcatgaatgtgcgtggaccccgcctggccttctgcccgacatgtactccaccccgccttctaccaggagccaaggctgtgaccattgtgatctgaacaagccgttgagagtgtgctctgttgtcagtgaattagttcagagagtccctcctcgtgttatagttctcatgaccactgcgcagtgttgctgtgctctgcctctgacgggtggctgccaggcattgaaaaaataacatcgtaagtccttactgctaacactgacttttaaaaacatttaattgtgtgccttttaaacttttgttctccgtacaacgtcttcccgatatttagattttaacttttaaaagacagttacaaattatttctaaagtataaagtctggttgttgtttttttttttgatggagctgtgaggaggaaaaaaatgagatatagaattttagtgtaggtgatcttgtgctttaggataaaaccatttttctgttactgctttttggtatctaaatccccggcagtttcccccttcggataaagcatcatgtaggttttagcacaccagcgggttcctggctctttagtgaaaaggtggctctgaggattgccctgtgcccgccatgaccatcctggtggcttggcgacttcatattgactgcaggccctgtggacagaaagaattatttcttttttagagaaaagatatttatgaccgaaaacagtgctaaaaacatgagaatattgatcatggttttgagagatgcttgcactgaatcacttgatatacctaaatatcggctttattctatcttccctaaaagacagattgccaacacaaaagatgaaccatcttgagggaaaaaaatcttatatctttctgataggctgtcttgcttccttccataacaatggggagaaaagaagtctgtgtggtttcctgaaataagcaacaaatataataaatggtgtatcggaagcttctgtaaaactgccttgggtgtactttatttaacttgtagtaataagttaaattaacatcaaatggaaattcaaatagctaaacatttaaccaatctaacagtaaacaattattctaaaatcaacataaaaataaagacccattrtcatcagaagacctaattcattgtttttagaggtaatctcttggggttctgtggaaatttataaaggaatgagtgaggctaattatttactcatcagatttttgaaggcaaatacttttctgttattcttaaattttagacctattttggatcaagatggtgtgttgcttttgtagtttaaggtagaagatagtgaggctgacttccttccttatcccgggtagaaagcctgactttttctggatagattgcagcctaggggttgtggttttggtcctgttctgcccttttcccaaattcttcttcattgcatctgatacatcccccttgcctgcagggcagggccctgtytctgtggcacacatagcaggaccgtttacatttcctctgctcacaggtgccgcccacaccttgcttcctatttcatgtcctcctcgtctctgtagttgagggaagagtattccattcaacagatggaaacaccattgcatctgactgccatgtctttgaaacctgccagaccaagtcttgactttcgttttgttttttttggtggagctgggaggagacagatgggccatacagtctatgtgtgggtgccttggtgtgggacacaagaaagtgaggcaggacgtggagcaccaggtcatcagagctggcagaggctgctccaccgtgcaccgaagacttggcatgtcagtggagccaggaagtctccgatgcagaagcggaagtcagtgtggccacaggagcgaggtggcaaagtgctggccttggaggaagagagaggtcagagagtagacagagggtgaggcctggatcatcatcagatgagcagacatgaaagccgctctcaacaggattagaaaacacagtttctaggggattcttgcagggaaacagacatggaggggcaccatttggtttgtaaaaggaaggtatagccctgaagttggcaagctcttggcctgctggcctgatgcagcaggcagctgagaattgcttggcctgtccatgggggcctgacaggtatctcaaattttaattgccagcacacacgaatcaggagatttcatatttcaaaaagcatgtatggctgctgtttcttttttgtrtaaggcttaatttgttttttttttcatgttatagctttcctgagatacattttacatactctaaaatttacccatttaaattgtacagcatgctgggttttcatgcatttatacagttgtgtgtccatcatcacartgtaattttagaagatttaaatctccctcttccccactgcccctgccaaaaaagggaccccagacctaccagcagtcatttcccatccccctccctctggtaccagcccaccactagtctgtctgtgtctgtggttttccctgttctggatgttttgcatcaacggaatcctgcaccatgtggccttttgtgcctggttcctttcccttcgtgtggtgttttcaaggttgctccacgctccagcatgtgtcagaacttaattccctgcggccaaacaatatcccatcatgtggatgaaccacattttgttgatctatacatcagttaagtcagtttcgccttttggtgttgtgaataaggctgcagtgaacatttgtgtatatatgtgttcatttctcttggggtatatatacacacacacacacgtaggcctaggagtaggattcctgggtccgatggcaattgcatgtttagcattttgaaaaacttatggttttctaatacagctgccccattttacattcctgccagcaatgtatgagggctccaatttcttcatatactcaccaacactttccatgttgtctttttgattttagccatcctaaagggcgagaaagatatcttcttgtgtaaaacgggcaaataatcaagctgggaatggtaagcagggtttttattcacaatagggctggttgatgggattcacaattacagaaggccacagagggaggacacacttggtgtactatttctttttgtcaaacaatagcattattgagatgtaaatgacatacagagtatacatacagtagttcccccttagtcatggggaatatgttacaagaacaccagcagatgctggaaaccgtagaaggcaccaaacccttggtatccctgaggggttggctccaggactcctctcggatactaacatccgcaggtgctcaagcctcttatataaaatggcatactattcttatatagcccagagacaccctcccatattttttaaatcatctctagattacttatgatacctaatgcctagatatcacttcattcttgtgaattcaacgtagtccttaacatatagcaaattcaagttttgcctttttgaactttgtagaatttttttccgaatatttttgatctgtggttggttgagtccgtgagtccgtggctgtggagcccatgcatatggagggccggctgtgcagtatcttttcctacacatacatccccataataaagtttactttgtaaactagcccagtgagattaacagcagcagtctatggaaccattataacaacatgccagcatcactattcttgcacttcagggccattattaagtgaaatgtgggtgacttgaacacaagcactgcaatgaccttgatagtctatctgatagataccaagatagatggctactaagcgacagaagggcgggggtgtgtacagtggggatgcaccggacagagggatgattcgtgtctcaggtgggatggggcgagatttcatcccactactcagaatggtgtgcaatttagaacgtatggattatttatgtctggaattttccagttaatatttttggaccacggttgatctcaagtaattgaaaccatggaaagtaaaactgtggataaagggggccactgtatctcacatatacagtttgataaaatttgcctatggatgaccccaatcaaaataacaaatattctcatcacccccaaagtttcctcttgcacctctgtgattcctctcctcacctcaacccgctttcctttctcatccccaggcaatcactgatctgctgtcactgtgcattagtttgattttctagaattttgtgatgcacatatatacatatatattgtattttacacaaaattttctcgttttatgaatggaattataacgtatagtctcttcgtgtctgagttcttccagtgtattgagtttgatattcatgcatgttgttgcatgtgtcagcggttgattactctttttgctgagtggtattccattgtgtggggataccacagtttatcattcgtttgttattgtacattgaatattgttctttctgctttcggctgttgcagacactgctatgaatatttatatgaaagacttggtaaggacgtatgcttctaattctcttaggtaaacacctaggagtggatcctatgggcaatgggtgtttagcattttaaaaagttgccaaactgttttccagagtggctgcatccctctgccgtttttatgaacagtgggtgggaatgcaattcttgcatatagtctctgatttcatatcattttccttttgcctggaagacttagcatttcttctgtggggtctgatggtgatactgtcttttagtgtttttaatgtctgaaaaagtattttcatatttaaaagatatttttgctgtgcaaagaattttgagttttctcttttccttttcttaaagatcttgttccactgtctctgacttgcattgtttcggaccagaaatctgctgtcatccttattttccttcatgtatgtggagcattttcccccctccaggggtttttgagttatgttctttatcgctggctttgaccatctggctcattttttgggttggtgtgcttgtcttcatgtgtctagtgcttgggcttcattgagtttcttggtgccatcaattacatctatatttgtctgttttaagttatcccacagttctctaatattgtgatttttttgttttttttgcagtgttttattttggtagtttctattatgtttttgagttcactaatcttttcttctgcaatgcctaatatgctttgaatgtcatctagtatgtttttcttctcaggcatggtgattttaatccataaaaatttgtgtcatttttatatcttaatttttctttttctttttttttgagatggagtcttgttctgtcaccaggctggagggcagtggtgtgatcttggctcactgcaacctcctcctcctgggttcaagtgattccctgtctcagcctcccaagtagctgagactacaggcacaacccaccatgcccagctaatttttatatttttatcatgatccacccgcctcggcttcccaaagtgctgggattacaggtgtgagccaccgtacccgacctatatttttctactcacctttttgacatgtgaaatacagttataacgactatkttaatatccttgtctgttaattctaacatctttgtcagttttgggttggttttgatttttttctcctcctagcagttgtatttttattcttttatgcttttcttgtaatttttgaatggatgctttatatgcaaatgttacctggctgggtgctaggttatttatttaataaatatcctttagctttgttctgggaggcaggtaagttacgtggaaatagtttgaatcttttggatcatgctttgaagattcactagttgcaactacagtggtatttagtttcaggctaattattcccacaaccaaggcaggattgtaagaggagagatcatggccggggactcatggctagacawaaaacaggacctcagtcctatcagtgcaaggaaatgaattctgtcaatacatagtgagcttgaaagagactcgcagcctcagccctgggagtctcagttgcagctgacattttggtttcacccggagaaacccttagcagaggactgagtccacccgtgcctggactcctgacccatggggcggatgagacagtagatgtgtggtggttaaaccactgaatctgtggtaatttgtggtgatttgttatgcagcagtaagaggtaataccgtatgcatcttcttgcatcatttaccagctttttattatatgtggaagtcttaygtctttcctcccttttttattgccctytgagtaccttgttgtccctttctgtgtcacattcttcccactcgcacgcatgcatccaggaataagagcactgtggctcggtgtggccaagacccactgtgtaccttccatgaaagatgtttgtgagtagcatgggcccccgaaccctgggtccagtcctgcctgtactgcgagccagcactgtcatcatggatagtgccctcagcccatactctcctctgtgaagtgtgtgtgccagcacactgacatcacagggtgcctgcagcatttggaaaacacgcagcatcatgcaaactgcctaggagtgctcaacaatttggagctggtatctttacacttaccacgttgaatattgcatgcagactacatatttgcagagcttaatgaacagagaggcattttaggacaactaggagaaactcgcscagattcccctcagggggagggaagctgttttgtaggtgtctctggcagtagcctaatgcagttgctttagaccctggtggtctggatactgcttcactgtaggctttaattgcattgctccaggtctgtggaaggctggaagaggccggtgtttttgtgtcacttttgctaccccctactctctctagttgacaggccatttggagcaccagggagtacaatctggctgaagaagcggtatccaaggaggacgtcatggtgtctgttctcgcagtcatggagcctagtgccaacaggccttaattctgtgttctggtgtctcatgagtggctctgcagtgggacgtcagagcagccaggcctcaagccgcctggctggggtggggacaaagtgtgtgttgtcccttcatcacgggagtgtggggcctggcacacgccctgccagggcctcacttgggccatgcctcagagcatgggtgctactcacctctgacctcttgagttttgcaggcaaactcaggtcgaatttggattctcagtcgcattgtggctcacatgacatgaaataaaatgttgacatttatttgcttcttgtggcctctactaaatatataaaataatcaaaactgaaactttccattattctcagcaggagtgaaacatcttgactttggaaatttttcctagtgatttaactcaagtcggatatcggcagcaccacctgcaatagtgaccccctatggcctgcggcggggctgcttaacgctcacatgggtggtcaccaaggaagggctgctggacaggcagactcccagagcagttgctacttacaaatccagcttccagcagggagaccattaaagggctgcttccacctccagggcgggcagtgaagcctccagctgggagccgcgtgaaaatcagagccaatgggagctggcagcccatccaccaggagggtccagaagacagaggcagaggacgtgggatctggagcccaagggaggggtcccaggtgggttgaggctggagatggcccaggaagccctggtttggggtgagggtgggcgagactgagaggctgctcagacaggatgggtggttgaatggagtgcggatcatgagatcatcacagggccacagcatatcaggccatgggttccctgttaattcctctcccacctcgaggaccggagcttctgttaggcaggcgggggctctgccgcaggcccacattctctgctaattcccttctctcctaaaggtttcagatctgtctgtggtcttttgttttacttggaaacacatgtttaatatatcttataaaatacgtttaatataaaaatatagttcactttatagttcagttgctttgagcacatttagtaaaccaagatgtgcttatatgaacttttccctgaaaagtacctggatcccagagttctacatggattgaatacttatgtttcgattttaattccttagatggctaactcagcattatttaaattttaataaagagactggatacaatgtgagcgaatttctctctatattttgtgaatctctatcagagcaaaataaaactgtttctgttttgcaatgaatagtttctagccatggaattgctggtcgaggcaagaaagtatgaatcttatttttgtggatctagccaagaaaaagaacgtaaactttgaaaagtatgtcatttgccattcacagtctaatgagaaactcagagaggctagaaactctcaataaaaattctgatatcagcatttaagatccagcaagatagggtatacgggcatttaagggattcacaatccacagtttactggcactttaaatgctgtgaatcttgtactggcaatcacaatcttgattttattaccgagggggacccctcgtgaggaatatgtcggtgcagtgtgcaggttaaactgtgagctgctccagcctctctcccgccggctgacggaaaggtggtcaaattaccttcgcaaatctgaagggtgcttggctccagcaaattggccatttagtcaaaaagtgtctgaaaatgacgtagtcgttggaagtgtttgggaataagcgatgagttggccaaacgcagtgtgttttctgtaggcaagcacctgtggcagctggcagggatgggcaggcctgcagagatggcttcctgggggsgcagcgtggtcaggcttgagggtggtgacagtgcccccaggagaaggcgagactggccagaactgggacgggcatgatgagtggccgtgtttcaaatattgtccatttttracttttgaaaatgccaaaagcaagtatgctgccttgtggaatctgtgcaagcagttctttccaggctgaccttgaatagcctgacagcagagcgaggagtgaaatgagcacgcctcaggctgtggtccactcgtgcgggaagacatggacctgctactgctccctgccctctgtctccccaggaaaggagcattctggctcagagattctcaaactgggtcttccaagaccgcacaggtgctgtgtcaggtcagagatgcctctgtaacaacgccaagacctcgcgtgtccaagagtgatgctgggggaggctgctctagctggacctagatccaggccaggccccagacctctgcagctgtccacctactcctcaccaccacgcgtttgcaggtggtggacggtgttttatttaagaatgtccttgttggccggacgcggtggctcacgcctgtaatcccagcactttgggaggccgaggtgggtggatcacaaggtcaggagttcgagaccagcctggccaacatagtgaaaccctatctcttctaaaaatacaaaaaattagccaggcatggtggtaggcacctgtaatctcagctacttgggaggctgaggcaggagaatggcttgaacccgggaggcagagatcacagtgagccgagatggcgccactgcactccagcctgggtgacagagcgagactccgtctcaaaaaataaataaataaataaaaaagaatgtccttgttgaagcaataaacgctaattgtactacaaactgaccctggagcacctctctttttagtagacacggggatgaagtgaagtgtgcgtaaagcacttctgccatggaccaaagcagggatgttttccggaggaagggtttgcgtgtgactcagggtgacgggagtggccacttttttcctggaataccattttcaccattgaaagtatcactgaccagccaaccatatttacccacacttgggtttttggcagaaattttcaaggaaaatagctgacagtatttgttgctagtactgaatgatgaaatctgagtttcaagtgaaaatcataattttgagaaacttgcacctactgccgtgagcttaacagcatttcaatgtttaaacaacgttttgctgataccagtgtggcattaactagtgtgaatttcggtagtgtgctgtggctgaaatgcctaacgtagatttgcatacctcagtgaaccagtattttctaaatgatggataatgttataaaattatgcctgggtaaaaatccaaaatgcaggctaggtgaatggattttaatggaaccgtgcagacagttgattcggaaggcttcagggtccacatggaaactgtggtttgggagctgccccttgttgagagttctgttcaggtatcaaaggagagtatccacagtggcccaaggtagattttcttcctgcacgtcagccagagccctgtatggaaacagactgaaggcagaagcagctgcgagagtccacctgccttctgttaagccagctgtggaagacagtctcaaaaatgtaaaccagtgcaactttaattaatcctttttttttttggaaaaatggttatttttcatgaaaatgttatatgtgataacatgaaatcagttcataactattttgaaatgaaatatttttaaatgttctcagctttcatttcaaacacagtatcaatagaaataacttgcatgaggaaaaaaatagctctttagagtcctcatgatgcttaagggtgagactgaaaagtcagacacccaccgccccagacaaacaccatggtggcctcggggatgctgcgaggtcagagaacctgcactctgcttccttcttgtgtagggtgagggagaagccccaagccgtttcttctcagggctcaggtgtctctcatcagtgtagggagggtcttcgggcatcctatgccctgctcattccctcgatgttatccggacaggagatttcagctcctgcgcagtgggcgctgttgggattcccaggcctccaagtcatgacggtgggtgaaatggagctggtatttgagaaggctcggaagcctccccttagaaaggtgggtcctgatcagcagtttgggatgcccctgtgtttcctgcatttgggatgggcggtcctccctcctgcctccccagctctcttgagcacagtgtggccggcatctggtcaggacttcagagtggccagccccgtgttgccgacgaatctgagagggagcccctggcttcttatttttctttgaactacgtcaacggaattgcttcggatccttagccattttaaaaaacacagtcatatcacgtccccttctgacattctcttaagctttagcaaataacagaaatttcagtctcactgtgccttgttcagaggtgacaacaacaatgggtggctgaggcgtaagtctcaatcatccaggctccttaaagcagctttcgggcatgtgtggggaaagtacgccacagacacccagggctgtgcttccaaagaggttttcaagaggttgagtattgacacstttccttacaaggtagtggggaggcctggaggccaggcagtgaggcgaacagtgctcagtgaatccacgctccaggtgaggggaggcaaatgtcggcagagaaggtgggagcagaggaggagttccttatgcagaggtctctgggcaggcagaggaaatgagcctcgactttgctstgccctgggaagggaagcttgtgatccacattatatcagtgtggggttttatgagctggactgagatggttgatctaaagtcacagttggcaagtccctgtttatgcgaggccggcaaagaattcacctctgagtgatctgtgggggcarccctgtgttggtgcctgaggcctctgcctttctgtggaggtctggctgatgcatgaggctagaaacagccattcatttggaagagggcgttgcaatgactcagcctctgggcttaagctttccttttgcataagaagtctgaggggtcctcagatgttttatcttcctttacaaagttgtgttgtcaacaccaaggaaacagtcttgattctgaacaaggaggtagcctgggtactgaaggtgaaaagagctcagatcagaagtttcttggaaagagatttaaagatttttaaaaaatcagattactaaggcatattaaaatatgttcagtcttacactgtgttctttgaaaccttgaattactctagcaaaaggctcagagggtactgctatgagaagctggatcttggacatctctttcaaatgcctcggtacctttcaaagggctttggatggaatgaagggacaccattgggtctcacagctttctcctgcctaacataccacagcagtgtatgaaattgttcccatcagctccagcgcgtgaaagacaatacgaacagtaacacccccaaagaaacagtggggctggagacagcagaatccttggagggttctctggctgaagaaatctctctcctaccacagatactgtccccagagaaggtgcacctctaccaccaatgccctccatcctcagttgacaaggattcaaaaagtttgttggtgacrctgacatgtaatattcccctgcgagttacacacatccaggtgaccttcggaccagcattgccggcacacccgtcacgccatcaacctgccaggctggagaagaccgctcagagcttttccttgactggggagaggggagccggagcagcgccccacgtctcacggttcacccctgccgtctctcggggccttccttcaggctttccctgtatcctcagatcttcgccagggtcctgtgatccagtgttagttcattccatgtgtcatatatgaatgatgtcatttgaatcatttcaagtccttttgtaggaaaactaaggcagaaaggccagcaccacaaagaggcatccagaattctcctcggcacaggagggtgcagccatggtgcctttgaggagacggacacgcttagttccccctgccatcagtgggcatctcgatgttaaccagatcttagaaattgctctgctcaggttggactcataagtgtactcttagatgcattcttccatgtttttggaatttcctagagaaaacgtcttctttgttcatgcccgtgacacacgttcctccctgtggtgacctggcgtccatcctgagctttcgtggtgtccacccatgaaaacaaaggtgtctgatcccccgtgccacagacatactcttaaccagaatctcccaacctggggtccgtggtggtcttcgggggggtctgacactacccagggtcagatgaaaagtgttgactggatgcgtttatgtgggcgctgcgatactcttcttggggcggggcccagagggttcctgaaattctcaaaagtgtctgtgtccctccttgtgagtaggagtcactgtttcagatgctcagctttccaggtgatttttcaaatccctggcacaggctttcaaggtgacttaagattgtctaatcctcctgcaggtagaaatgagagtcatctggctgatggtcacgagccgtcggggagttcctcctgtcttgcactcaagcagaggagtaaggagacccctttagaatgtacttctaattgttgaaaagcacctaacaagttttctatgggggagattatacagggactgggtagggacaatcacgtaagacatacctgtttatagaaagagctggatatagaattataggtgggttcagctgcacaaagaagagtcagactacggaggcttgaaggagctgtgaatacactgggcatctgacatcattgcttacttccccctgccccgccctgcccctccctgccccagggtatcggtagcatgtgtcctaattaaattttgacattatgtgagttttagcatggtattttctgcattgggctatctgtataatgtcatggagtggtgacataaataatgctagacttttccaatttatctaccatcccagccccctccccaactcagtcatatgtggaaagtcagtttctttttccatttattatagttgttaactaaagattaaaattttacatttcattgcactgttcataaattgtttataaatacagtgaaatctaagcaaaccaagatgatcttggaaagaagtgttctgtatggaatttatctgttcagacccaacatgcacacccttccttcgggatgtatcaccaagatgaaggcgggcagatctcatgggcatgagcttgtgtgcaccgaggaagttcctgcaagcagtcctgctgcacctgggcgggggacaccctgtggagaaccacggtgcttgagtggaaggagtctgtgtctgtttttcagaatgccttcttgccttcacaactaatatgcaacaaaaataataggattgcacctgcttttgatgcctcaagatatgcagaaatacatttccctcacttgagcatgtctctggatatactaggacagctaggtcgtgcttgcgtttcaggccacggccctgctcaggagtcaggttcagcttcttgcattgagtcttatccgccacagcccaactttaacagtggatgatagccaggaaagagagggaagcatttttggagctggttgtggttttaatgaggcatatacagacactgctttagtggatgtaggagtgaggggggtggggtgtagtggttgaggaaggggcttagtgggctggggtgaaggtctctgctggagatctaggagttttccctaaatcctcatctgatcttcctctcctgtagattgttaggataaatgagcaagaagattctgcgcaacaaactgataccttgctttcttttgtgagcagcagagctggggcgtggagagggtacgtccagtgttggatgtcaggaagttcacgtcccagggtatctagtacatctgagctctaagcctgcaaaggaaccttctttacaaattgcaccattgttatggttggcattctggttaaaagttcatctggatctcaacctcgcgtgaaattgcagagctacgactggaaaactcggcatcagttgagaacctttggggacttctcagacattacagttagaattgagcaaaacatgctgagttccattcactcacattttggtgagtgggttaaaataacagtttagtttcgtcatttttattacctacttttcagacagatccagaaaaataaaaaaacaaaaaaaaagacaagcatcattaccatgtttaggaaatctttgagaagaaatatgtatgaaatttggcatactggctagccattcccttacccccttatttttgattatccaaaagctcaaggtgactttgctcttcccctctgtgactggggttagcaaacaacagccatgggctagatcttgtccaccagctgtttttgcatgatcaggacgctgagtgtggttttttcattttttaaagggttgtaggaaataaagagactattgagtagagacctcacaggccttggaaagtgtgacatacttcctatctccttctctacagaagtggctgctgactcctgctctttggggtcgaaacacaaagactgaataatgatgtggtatttttgtatttaaaaaatggcatagggcatttttagggaggttgtggcattgacgtattctgtgttgcttcagagagatgtcgttcggtgggtagaggctgcgcagtggcccactgtgattggcatggtggtggctctcggcccctgggcctgctctgcagtcaggtccaccatgtggaagtgctctgagactcggtgcacgtattcaatgtttagtgtgtgccagccacgttctaggcaccgtggatgcggccagcaaggaagatgaggaccctgttctcatgcccagcctcagggtgggtgcatggagcatccctggtcgagtgtgtgctcaggattcctttagtatgtcatgaatctgtcgtgtttctcagagcagacttaggagccaggctccctgagattgaaccctgcgtgggccacttctttgctgtggaaccgtgggcaagtctcttgttctttctggcggcttccatctgtataaggggatgatagtgccaatctcttagcgtaggtgacagattccgaagtaaagggcttgtcaagtaggcctggggtgggcctggcacatcctgggtgctgcctgagggtcagatgtcatcttggtggcccacactcccctgcagtggtgctgctggttcaggaagttaaagtggaaaactgtgctccggaataaacacaattgggagaacccaaaaccacacgcaagaaagcaaaatgtgctgcccgattactaagcatggagttaaactctatttggtgtttttgttctgaattgttagggagtaagaatatttatggttggaatccttggccaatcctaaattttcttctaactagtagataattaagtgtctgcttctagaggatgtagatgtgcttgtcttgtatattacaaagtagagacgacttgcccacaccccctcctgggctcacactccatgcggatggcgtcagtagcttctgagcctcttcaggtgctgaacacatgccctgagctgcttgttttgacagggacatcatttttaaagagtcctttattaccccagtttactcacctcttgttgtctccagcccttcccttttttatgttcttctctcccttttcccttagcaattgctaataccctagttggtactgataaaagaaaaacttaagctgaattgaatttaaaggagtttaattgagcaacgaacaattcgcaaatcgagcagcctcccaaagccagagtaggctcagatggacagaaaaaggaaagtgacagagacgaggcacagaaacagccagattggttacagcgtttgccttatttgaacatggtttgaacagtcagctatattggattggccaaaactcagtgattggcacaagagtaggctacggtctgtttatacctccacttgttatagttcatgaggtacagaaaaaccttgaggccacattcaaaacatggaaggaggcagctttaggctaagcttgattcaacaggttgctctcgtcactaggaagtagtcatgtacaaatgcaaatgtgcttgaagtttcaacctagtttttagaatgtgggatcctgatgggtattcctctcatcttgctgcttcttgtcttgcgcatttatcatcccttcgaggcagtggtttcagatcttaatcctttttcctagtcacctaatattctaagatrtggctatacaaagcatttccaaccattgtccttcccccctcaaaaattatggtaataagcgtccttcccaccccacagataatactgcagtcagtgcagacatatgcttgtacatgctttcacacacgattcactgaggccggcaagtctgtgggagggagttctataactgaatgtttacacrgggtgtgcatatctttctctttgaataggttgtttctatactgtttgtcatgaaaactcagaccattcccattttaccatcctttcttcaccagggagatagagtgacagagcracttaattgttgcccatctgatgcrgatcaagtgtcatattaactgtgcatatccctgcaacgtttgcacactaatgtacattggtctttctagatgcctgttgttacctataggtaagtaggtaggtaggtaggtaggtaggtaggtagatgtctgctagcaatttgacgggtcatttctttttgaaggataatgaacaaatttgaaacctgtggcacagcctgggacctaagtctgtgtggtgcagggagtctaacttctgtctaagtcagtagtatctccagggatacagccttacatccactgctggctgcggcttctctgagcgacccatctctgcgtccgcccatccatggctgccatctcgcacaaaattattttcctgggatggtcccttgagttagttcgtggttaggggtagctctcaccttagtccctacaaacccacctgaatttcctttgtctccgagccacatgggaaggagactgtggaaaataaaccaagagattctctagtaggtagagctagaggcaacaggttaaaatcacatctttataggagaatgtttggggaatgcattcagcagtcacccattctcattaatagacccagmaaacaattaaaaaatacacattgtgatttggactgggcagacatgccgactgtggagccatttcttaagagagggaggttggcaggtagctggtgagcctatttctttgctcattgagctagcaagagcaacacccattactttcattggattacttgtttgaaaattaaattaatcaagtgaggtaaacatccgtattgcctcttagcacccccataggctgcccgcaaaatggcctgcgtgggtatcctaagagcaggaattggctatgacctgccgaggtggccaactcagatgtggccagttttccatacaagtatgaagttcctgaattaatgggaaacctggctgcattgtctgatggcttactggcaagcagtaattagaaaacatttttcatagtggaacctcaggtttagctatccagagaaattggatatttcaaaatactcctagttggttagtgaaacattagtattaatgacaaattaatattaatatcaatatcagagttgagtatgtagcctttgggaagagaagggaaagattttaaggaccagatttaagtagcctccatatgcctttccttcttggtggcatttttcatctgaaagcattttttttttttttagctcaaaaacttagatgtgaaaaattcaacgcattgggaagaggcgtcaacatttgaaccgcaaatgattaaacctttatgactaaagtaataggtttggcttcagtcttcccagtggagtagcaagcagaggtccttttcagtttgcaaacagtagtatacaaacttggtccatatcaaatactgtttctcttccagggcttgtgtgtgcactgggaacagcaacaaaagttgaacagcaactgggtggkgtttctttatgtcttctgtttaatcagagtttcctgatggtttggccacttcattctcctttggcttaaggggttctaagccatggggcagaccttgggtggctcactgctcttggaaggagggtgtccagccttcctggcagtgtggagatgagtaagggaaacactgcaggggcttctggcttcctggatcctgcccctcacctggggactttgtctaagtcctcatcctagcaccacctcgagatcgattcaggcctccccagcagtggcagaaatccaaccatgggagctagtgggttccattactgtggagtagggaagaagacatatgtcccttctaagtcactttaatttggtccaaaataaataaccaaagtccttggggagaccgtcagggaagtatcttcccacatcacacttggtctttgcaagaagtgctggtgggcgtgcagggcttcttgacacttcrcagcaacgtaaggatgtggtagtagagtgcttggtgttccagtggccactgcaatacaaatagagtgagttttgtcgccgtggtacattacagccatggaaattccccgtagttcattggtccgtgaccaacaaaaatccccctagactaacaattaatcaggctctgctgagcctttgactggcgacagttgcagatgtcacatcatgcgaaaagttaratctcagctttccccaagaaggaaaaaaagtttatttttacagtttatggaactagttttccttttgatcaaatgacctggtctttaggggagaaatattttcatttttatgttagcaagtgtgatacagaatcatatacatttaaaatcttcatttttattgctttttttttaaagtacaaaattttaatagtaatagtgatttcaagaaaatgttgtgagtgtcactttactagtcaggcatgttgaaaaggaacgcgcttcctgaaatctccaagcgaggttggcatttgagacctctgggtacgtgagcttaaaattaatataagtacctgagcctagagcccaggaggtttagaaagactcagagatgcgcttaaagataattggtgtgctcctcttgtgagagcggattcaccaaaatgaagttaaaatttgtttgggaagttgcttgtactgtgccttgtgaacttacaaatctgtgtcacaatccaaagggttgagagccacacaaagcaaaacagatgggccgtgtgtcgtaggatttcctgctgtcctttcggcttcaggtaactaggacttgtgaagcacaagatacatgggaggcaaatctgaaaaggaatggtgagtgcgccccacgtgcctgggtaatacctgagtgctcccggcattacctgggggctgccaccctccctccccctccttcctttccagctcaacattgaggtgaactttttaccatgatcgatgtagctttctggtgtctacacagatttctggatggcctcagaaatgtcacatactgcttcgggaatgtctgcaagtatatttcatacattttacctggcaattaaaaaaaagtcatctttaagatattagcatgtggataccgaggttccacacaaagcaaacaaagaggtcattcttagcagctaattttaaatcttcaggcaactatacgaacctatgtcacagtctctcccaaaatttattataatgcccttgttataaatttagaatatttttgcaaactcatataaacaagtaattgatgcgactaaaattcttgtcacatatttattgcactatcagctaaaatttttaagtgacaagaaccaaaataatcgttaatttttatagggcaaggatctggctttttgtctgacacaaagctgtataaaaaactgcttctgattttatgcacattgtttttagttaatgattttcagctgtttgttgtttctctgatagcatgaaaatgtaccatatgctcagcccaaagacagatgattagcaagtgagattccgggcagctgtctgactgagcgcgttgggttgatagcattctgctatcataattagcttaagctttgggttaattaactttctacctggatatgcataataatagcaaactgcaaaaagcaagaagctttcagtacatcaacaacattgctgtcttttttatttggtatttcaagagcatattagaatttcaagagtgattaatcctgggaatattgtcatctactgtagattttatttgcaagccagataatactgaaacaattggaatctattatagagcagaaatagcattttaaaattgtaattaaagtttctaaaagcaattgctaatttcaaatgcctttgttggcaagaatattaggcacactgcttcttgtatgggcagcttgtcgggcacaaaaaataccagcacttacactgtgaagaataaaactttcttttatttaagggctgtattgaaaataatcagttatttttatgtaatttgaaagtaagattactctgtagtttgcagaggtgctgttcagactcctagattgaagatattaaccctgtgccctcttgcaggttctcacctttgttacctcctgagcagtggagggctggaggcctgggtaggagtgcctggtgccctcttagaagatttgatgtgtgcgtgtgtctgcgggtgccagaggtcagatttttcaaaagtcagtgctatacatttgtagcttgatatttgttttctaccccaagcagtttctaaatcaatttactgatggtatgaaatggggagagggagggctttgtctccatcctcctccttgtttgcatgatttaccaaagcactctctacgacgctcatcatctgaaggggctgccggggcctttggagagcacaagctagtgaagtggatggtggatttggagtaaaaattgtagtttacatttcccaaagcaccagagagcctagcacttaattctgaaataagtcatgcctgttgttacactcagaaaaatattttatcttctgaaaaaaaaattctttacatatgcagtggatggtgaagatttggtggcggtgaatttgccctggctccagaggactttacttacagaatcagcagtcgtgaaaacgtgctttctcagatgtgtgacttgtggtcagtctgtgggctcaggagcacccatttggtcaatccatgcaagttttatggggctgtcagaagccatttttcaaaattggcttcatctgaggacacgtggaggagccactctcttggtgtgggtagtgaaaggagtggctccctgtggctctgtcttgggagttgggggctgcagtggttcactgggaggagggggtgcccctgcaggccccacctgcaccccacctcgccgccccacccscyccccccggctttcaggctgtgacctcaaggccttttatcattttcacaatgatgtctccaacagacctttaccccagtctcaaaaaagatactgccagagcctgcctttgctttttgtttagtctgcttcgggctgcgtcaataaagatagcagaggggtcaagagaaaagaagtgaacggaatcacagttttggtgttgaacccttaaatgggggccccactgtctctgctgtgtagcaggcacaggattatctgtctgccttctgagatttcttttaatgttttaccaaattaaacatgaacaatttcaggatgcaaaaacttgactgcatcttgttgtttcttaaataagagcactttaagaaggcaatatatggagattcttttgtgggaaagatgtttcaaatgggttattactggccattgaaagaaagaaaaagaggaaatgcatcgaggcctcattttttggcctgcacatttgattattttattttaaatgccatttcaaacatagtgtaaactaatgatattattttttaaaaaacttactctactatttgcggtccttgatctttaatttcttttaatgtcaaaattatttatttggccagttccattccagatgtgactgttgagggcacattaatttctattctgttttcatgggcccctgtccccatctgtacatcatttctgacttccgtgtgctccctagggagttcacttattcatattgtaggtttcatttgctgtgtaaacagaataaacagacaatgcaaaaatccccacaataccagaaaataattcttttcaacaacatagtggatcatatttaaaaaaaaacatggaaaatgcaatacatgtgaagcccattttttccactttattgtcctcccgaggaaaggcttgtgttaccagtgcatttcccttgaatttgataagttcatttttattaaaaatccatcccaaacagcattttacgataattctcaaacacgtgttgtggacatttctttgttttgcgtattagcttggtcttgcgggttaattcggaatgtgttactcaactggtatgtgcttgcgtggccaaaaacacccgttgtgctgtgtgtgtgtgaaaagcaacattcaagaacggtgattttttttttttgacatttacaaataaagagggacatgagttatttatgctccaatgttgctgcaaagtccttatctccatttggcactaaacaaggatttgttgtgggatttgtgagggctgcgcagtgcctctgtgctaagcacccaaaactctaggggactggcactaatttcctctctctcgtaaaacaacgtagtattcataacaactcaagaggcttgacataagtaatgatggcatgtgcaggcgaagattaccacccaacagtgtaatcaaggtgctaggtactaatgcaagttaaattgagacaataatgccgaaacttgcattgtgggattaggagggcacttgaaatgctgacgtgagcacatcctgyctgcctgcctgtctggcgctccgttcctgtttatacttaatgacctcaaaatttgtatgtcgttaacaccgtgtactgaagtgggagagaacacggtttgggagggagaagactccctgtcttcgttgacttttgtctcttttggtaattggtggcttttcctgccgtattagggagcaaagcgtgcagcggggaggcccctgaggtctctgtaaacatgctgtgggcaccgagggcctccgcacccggcgctaggcagtaatttacatactttgaatgaaaagtcatttgtgcctgcaaaattgttattgctggaagaaatttaaatactagtcatatggaaatttgaaataaagtcatattaaattttgatgctcagatcaatattgtggagccccggtaattaaagtgggtttgtttatttggctccttataaataaaaagggcttaatacagactaattacacagaatctttcgtctacggtrggataataatggcagcaatttaaagtgatattaaatgagaattaataaaggaatattgagtcactttgactgtattaagctgtgaaatgattcctcatctcaatttaactttctgtcttgagcataatgtttgataagcaatgmatttttgtaggaataatctataacagtatttgactgcaatatttaataacaactagacttgtgactttatgttgtttttaaatgggctgggaaagcccgttttttctctgcaaatttataggacaacttagagggttcttgccctatggtagcttcacaagagttctgagttggcaccctccggtttgggaggtaggtrgagatggctttgacttttgttcaacttacaagggagtaacttcttggaagtgcagtccgggccagcagaaatggtcatagtaggccatggtggaaggagaatcagaaccacgcgtaaatcctcagaaggaagagggcagtcatttttttttttttctcttggaggaatatcccgggaagaattacctggaagaaatcagagtggttttggaagatggattgtcggataacattttaacttaagggctgaagttcctttctacctaagtaccattgaagaagtatgttcctgatcttaaacatttttaatagcagtctaggccaattgactctgtgaccattaagtaattttcaagtggactggctgctgccagggtgtttgtgttttgctttgttttgtttgcagagtaacttgtgtgtaatttctttccactgtgccgcacagcatgtcatgtccacgttagcatttctgcccttttaaagggtcctgctgaaggtcaggacctcacactgaacaccctttttatatatattacaaattgctggaattgttcattaatttctgtctttgaaatgccatgtcaaccctctaaaggaattcgcagtgccagtttcccttggacagctgctcaccatggtccagtgcgaatttctgatgaaattacaggtgcagggaaatgcagaattagaaatatatctgatgttgcaatacttgtgaagctatagctttgttgatgacaggacaattccatttttgacagtttaatttactgttgccagtggacaagagcaagaggaggacgtggggttagccacctgccccctcgtaccgtgtttcacatgcgaggttgcmaaatcatgactccctcaacctgtcgggctcaaatgagaaggttttcagctgggaaaatggaatatatcagtgcatgtaatattgcctgacctcataaaacaaaagggaaaattgcagattctgacagccattatgaatcttgtatcagcatccaaaacgacttggagccagggtatagtacatgtttataatagaaaaaaaacggggttgccacgttgacttgcaatatggagcaaaaaatgacttgtcataattcgttctcagatgttaaagaggctrttgaatttactagtatatacacagaagaatgcgtagcccggagcagagtgtggaaatagtccctacacagaggggtctgctgaagttagtcatcgagttagattagaatggaaggcaggaggggaggaactccgggtttgcgccgcagctgcgtcggtggggccagatttctcattacaagatgtactgaacctttccactttcacccactgtaaatctataagtaatcaggcttctaaaataaagcaammaaccttgttttgagattatgagaatcatttgaattgaatgtattctgttggaaaactggtgtattgaggcatggctttttatcttacgcttaaaaagttttatttatattaaaataagrcataatctctctgcgtataattatacgctcttcgatttagtttttctatttaatagtctattccttcaccttcttgcccatttctttatgttattccttaaaaaataatttctaagtacaataattgtctcagctgcttttggtgatttctttgggaggggagatgtggagtgacagtccaggaactttctgcccaggggcaggaggcccagcgcgtgctccccagctgaggccccgtccgccttggccactccctttcatctcccgggctgaatgcggagtgtggtgacttttattttttcctttgctattggtttagaatgagatgtagcagttgatttaagtgaagtaaagcatgcttacgcagtacactgtgtccctgtcggggcctgctctctcatgtcacctgccggcggtggcatggagacaaagccttctctcctctcttactgctgctgggcctctcctgggcaggtccgggctcagtggcttgaacaggtgatgcagggmggggcagtgcctgtggccacagtgatggcacaggtggacatgatcctgagagtccagtgggggctgtagcacaggaaaggaggttgtctacagcctttctcaccacacctttccctcctcagtggaatctctggccccatctggagtccctggaggctggatggtagaactggaatcgttggcccgatctggagcccctggaggctgggtggtagaagtggagtctctggccccatccggatgatggaggtggaatctctggccccatccggatgatagaggtggaatctctggccccatctggagcccctggaggctggatggtagaagtgaaatctctggccccatctggagtccctggaggctggatggtggaggtttgctggggtaaccctaggcggtaggtgttgccacccaaggtgaagaggaactcacagcagcgctggcttagcagctctgtggggcataacccacttctttgcaaactctggtgctgggagatgatgaaatgagcacctggtacattaggtttgggacttaaagctgatacttccattcgggagcaggatgagtaagacctggtgcttctttgctcagagctctctgaggtgggaggctggaagcgcttccctgaacactgtaggaagtgttgcaggagagcggaagagcaggaggaggaatggtgcagaggaggaggagcagtgcggagatttcacctggggggacaccaccacgggaggcaggcggcaatggtggaggcgttggctgagcagggcctttagaaamaggcccgggagcttggcagcagaaaggagggtggaagtgcagaagcatcgagatgcccagtgacgtctgtgcagtttggattttgctgttgaaaagcaaaggagatgaatagaaagctttaggcagacactgagagtttttgctttggaggtattttgatatatggtaaactattgtttggattattttggagtatgctttggtctattattaaatatcccagtcaaagatagcagatattcaatatttgagttaggatttttcaaatacttagaatatttgaaaatatttttatcattagaatttattgattttttgagacactatcatattctaacaattgcaccttattctttggcggtatcactgtcattgtattaatggcaaaggcttcaaaatagcctgtcaggcccatgtcatctgcaagtcaaccctcaaccctttctctctaaactcctctcctccagtttgccaaaccactgtgctccagccatgctgccctccttgctgttctggaacttgccaagtatgccccaccccagggccttggcatgtgcctggaacacttgagcccccaccctgcacatggctggccccttgttttcttcagctctccgtccatatgcaatagcgattcctcatgcccctcatagcacttctggactttttccttgctctattttttaccaactaaaacaggggttggccaaccatggctctcaggctggccacctgttttgcaaatacaattttattggaacacacttataaagacttgatttcttatggctgttttccctatgatggcagagttgaatagttgcaataaagtctgacctgcaaatctaaaatgtgtgtaatatctggctcattaggcaaaagtttgcaaagccctcatctaggatatagtgcattcatttgcctctgtccctgactggaatgcaccctcccttaagacagagcctatctctgtttggcccactgctgtatccctagagcctacaacagtgtctagcacaaagtatgttctcgtgagatacttgaatgaataaatgaacaaaagtgaaagttccagccaacaggatgatgggcagtagttaactatgcctctaattctggcttaaactttggtatttcagcctttatgtatgttctattttgcagtttttatggtgcacaggatgaaagaacacatcaactcctagggagtagaggaggcctggaaatagactcagawgcagaattgtgtgcaggtggctgttggggagtgtattcattcattctcacactgctattagcatctgagactgggtaatttatgaaagaaagaggtttaattaactcagagttatctgggctggacagacttctgcttctggagaggcctcaggaaacttacaatcatggccgaaagcaaagggggaagcaaacacatcctcatggatggagcaggaagaagagagagagtgaagggggaggtgccacacactttcaaacaaccagatctcttgagaactcactcactatcatgagaatagcaagggggaaatctgcccctgtgatccagtcacctcctaccaggacccttctccaagactgaagatcacaagtcaacatgcagtttgggtgtggacacagagccaaaccatatcagggagtattcccaggatacactctgtaaggaagtgcatactgcaggatcgggcaagggagaagcaggggcttgcattatgacctagttgcagttgaggtctcatcctgtcctgcagggaactctggagagagaatgacctgtagagtcatcccaaattgaggccgggggcctaagtcttggctcccgggtgcgctctgggggggccataaccttggatgagatgctyctccctcgagagcagcggtgaagtatgcacctgcctctgagctcctagagctggggtgtgatgcactggtcctgaaacaaggcctgggcaagtacccagaatttcagttgtcaatggaaagagtcaaactctgtaaaatacttatagggatttattctgagccaaatatgagtgaccatggccagtgacacagccctcaggagatcctgagaacatgtgcctaaggtggtcggggtgcagcttggttttatacatttagggagacatgagacatcaatcaaatacattaagaaatacattggtttggtccagaaaggcgggacaccttgaagtccaggggacttccagcttataggtagatttaaaaatctcctggttgataattggttgagtttctctaaagacctgagatcaatagaaaggaatgtctgggttaagataaaggattgtggagatgcaagttcttatttgtggaggaagccttcaggtagcaggcttcagagagaataacttgtaaaatgtttcttatcagacttcaagtctgtgtggatgttagtgccggagaggtatagygaagcatatccaacccccacttcccgtcatgcctgaaacagtctctcaggttacattttgaaagagccctggctgcggaggaagtccatttgatggttggggttagaattttatatttggtttacaaagtcttgaattaaaatattttatcattacctagttttatacccrggaatgttagttgttgcacgtgaggacatgaagtgagttaatgcagggcttgggccgtccagtgtcttctttccccacagccttgctggcagtgaccccatataaataggaacaattaccggaagaaactgtgctcctcctaaagcctagctagtgacttccacctttgaaccataggcgaggcagcacttaaccagggcactgtttgataggatgttacaggtggttccagagaaaaacgaaacatgtcatcttgttaagggaggtcttcgtttcggcatctctgtaaaatatttaaagaggtatttttatttctttaaacaggctctgcctcttccgtccccctcgcccaatgtggactctgcccgtccttcctgagcagtgagactctgtccccatgtgcttctggtcacagctgcggtgacatcctgtaacattgtttggtccttgcttaaatcagttactcascatgttatagccgagttcagacccactacacagacctcctaaggtgctggcctgtctaaaacattatttccattattcattcctgttcactctgggatagggaagccatgctccaagctgtattggaatatcaggtccagggtaattagccagggcctaaagggtctgttttggaaaattcaagtacaagtagaatcttctttagtatcttggatccaccagggaagagatggtctctgaggcctgctatgcagaataaaaccaagagagtcactgtgaaggaatccaagagatgcaagtgctctttgctgtccagtgattaaaatgaaagcaaagacrggaagcgtccttgatccacattttgcctgtgatytgaatatcacatgcttggtccgggcacttaggtgggcttcagtgatttgggccggaaggaaatggtgcccctttcctcgagtttctagattgttttgtcacagacaggggaagccctcatctgacttgccctgtaggaccctagtctgtcgggaggtctctgtccccacccctccctggagtctggggtgtagttgggctgaccctcaaaatatgctgtktcatcaaaggttcatcatctatctggtctgttttttaacgcaacttgataaaataccagtgttttaataaaaaggtctaaaacatttaccatttaaatgagcctcccttcctgggatgcacacaggagtcttggcgggaggctggtggcgcaggctgatgggtcctgtccctctgtgccttgggcgcctctgcccagcgtcacgcagtgtcatgagacccctcagtgcaagcgcaggtctgcctgaggtcccccctcccacctgcaacctggatgccttttgtgcctatggaacacaactgaaagggccggtcagtgccatggcttggctaattcatggtggacatgcattttggtttttaaaattatggtaaaatatacataaaatttcccaccttcaccatttttaagagtccagctcagcagctgtcagtgcattcacaccgtcgtgcagccatcaccaccacccatcctcagagcccctcatcttcccacagggaaactccatccccattgagcacagactcccccttccccagccctggcacccacccttctactgtctctatgagtctgactacatcacataagtggtacagccattgtcttttgtgactggcttatttcatggagtatcatgtcctcaaggtccatccgtgttgtagcacgtgtcaaaaggtccttccttcctcaggctggatatgggctctttaaaagcstattttcttagagcaaaacccgtttcccccacacctgatcgtcacawgccgtctaagacacgtggtctagggtttgctagtgatcgtctgtgggctttccsagcctgcgctggttttgctgccacaacctgaggtccgcggacgtccctgtgctcgctatgacttctttgtgtgagactrtcagagtgtgytcctggccctgacacgtgctcggcggctggtttttctccttcagatcagcggccttggacagctttcgcttctttggcagccgtttcaagctgctccgtcttgtcattttagagttcaatatctgctgctctgaaggaagaaacggggatgggctggaccattgcacttggtctcttgacctcgatgttgcccatgagcagtgaaggatgacttttgacgagccatgtcagatgtgacaggcaatctagttggcttgagtggaaatgtgctgtacaagtttgaagccttggttgggggcatttttstggtgttcaatgcatttaaattgacaccagacttcagtatgttgttcatttcaggcccagcactgtaggctcccatctttaaaatgtgtgggtgccgagmgctccctcgtcagcttttgcaaagcattttgcatattcccagtactgtatttacattcctggctcacattggtttttgttttttgtttttcctatcttaaagcttatttttgaagtgaatttttaatgctttcagttgagtagggatttgtggaattttgaggggtggggaggtgcagtggagaaaagggggaaaatggttgtttcttggctctcagcataagctacattttccatcatatggagtgagatgcctatattgggcagctgtgattttaagtgaaagtcatttccagttgtttctaatgtctagaaattaggtttgttttgattttaattgtcaaaggaagggactgtgggtgaggaagagcccttgccgccgcctcccctgacgtgcccctgcttgggcagacgcctccctggtgaggtgtgggctgcgctggacagcacccaggaccacggcctcgttcttttccttctcactgtgttttcctcttgggtaggggtgagggtggttatttyactcagatctctgagccttaaagtggatcttctgcagatcatctccagagtcatctgacggcgccgggcagaagtctgtatgttgggagctgtccccagctcctctccttaggacttctgaatctgcttcaaccaagcatattcctgcctcatccggaacattcctcaccctctgccccagtgcaggcggtgtccacatctcagggatgcagcgtggtggaatttttaaggttttggttggcgtggatgagagcatctctgctgaggctgccgtgcgggtgtgggctgggtgcatctgtgtctctgggcaccatataccaagtggcactcatccctgtgagaacatggcctgggcattagaggataggatccttagtgtgagggaggcctcaaccataaagggactgaggggagagacaggaagggtccaggtataagaagagctgcccacggcagggggtgtggcagtgggaccaggawgaatgggtctcagtaatgtggctccttccccaagctggggagcaagggaggcttctgctgttgggtgttgaagaggaatctttggtttgcagatgggggtggggtgggtctttgcccatcctctgatcgtatgtgtagaagtttgcaacatgaagggcagactgtggtggagttctttggcagttaggaaagcaagccagggcacagacgtgttctctgaaaggcagggtgtgggcaccacaggrtcagccctgcaaacaagagcactgagcagagggagcggcgattggattggagarcggaggctcccacctggctcacatactcctacatacatgccacacgcatgccacggtgcttaggaatcttgaaagctgcaggctcaggggagctgcgatgctcatcgtgaagatgcagagccggagaggccgcccaggcaggaaggccagtgctggtcgcctccaggtggtctcaggatcccagagcaggaggcagccatgtggtgctgaaggggaagcgagggcatagaagctgtgccctggagctggaatggtagacagggctttcttagtgccagggcctgcaaattcccaacaagggctcactggaatcctcctcccgccatcctcccaggccccccattggccggccaggcccctggattacctctctggtgccctgtcctcctccatgctctcctctaagggccctcactggcacctttgccctccttaaccaggtaacactaaaccaggagacatctagaatcctgtttgagacatcttcgagagtcaccttgttaactagacagaagtggatctctacaggttagagcctggggaacctctgttttctttgtgatattctctagtgagtgttccaggaaagaacatgccccactgtctcctttctacttgcagatagcggtgaggtgggagaggggcctgggagtgtgctcttcattctccacctcctcccccgaggaggtggtcatggtcactcgcttgacgagcccagactctgagcttctgcccctttattgagcaaattcataaagtcaaccatgctcttttattatgtaacttgttttttagattcaggggtacatgtgcatgtttgttgtataggtaacttgcctatcacaggggttttgtgtgtggattatttcttcatccacatgataagcacatgataagcatagtacccaataggtaggtcttcaatcctcaccctcctcccaccctcaagtaggcaccgttgtctgctgttcccttctttgtggccatgtgtactcagtggttagcacccacctctaagtgagaacacatccatgttgctgcaaaggacaacatggatgcaaatgatctcattcttttattatggctgcatagtattctgtggtgtatatttaccacatgttctttatccagtctcctattgatgggcctttaggtttagtccatgtctttactattatgaatagtgctgcagtgaatatacgcgtgcatgtatctttatggtagaaccgtttatattcctttgggtgtgtgcccaataataggattgtggattgaacagtaattgtgttttaagttctttgagaagtcaccaaactgctttccacagtggctgaactaatttacattcccaccaagagcgtataagcattccgttttctctacagcctcaccggcatctgttattttttgactttttaataaaaaccattctgactagtgtgagatggtgtctcaytgtggttttgatttgcatttctctaatgattagtgatgttgagcatttttttcatatgcttgttggccatatgtatgtcttcttttgaaaagtgtttgttcatgtcctttgcccactttttttttacagagttgattgttttttgcttgttaatttgtttaagttctttatggtttctgggtattagacctttgggggatgcatagtctgcaaagtgtgcttcttatgcaagcacccagccttccggcactgggacgggccacatgggaggagccaaaggatgggagagtttaccccctccagcccatgaacttgctgtgaggacccctcctgccatataccctcctgggtgtgaagaggcctcctgtgtgggctgcaccactgtctccgggattcttggcctggaggcatctctgaaatttctcagaatgcccaatttgcaccagagatagagccaggccccttgggatggaaaaggaaaagaaactagatttactttttaaagtttctagaacttctttggtatccctagaaaactttttttaaaaaggattttctttttaagttggatttctatccattatttacctgagacataatttcagctgatcaaagtttagagtgctggcaagtgccaagccttacgatagatgttgtaccttttgacaaatgaccatgtatgcacagctctgtttctggactctgttctatccatttttctgcttgtcytcatgccaacatggccccgacttcattgctgtggctctgtagtaagtcttggtgtcttgtagaagttctccaaatttcgttgttttttccacaattgttttggctcttcttagtcctttgcatttccatgtagaataagtggattaattagtatagaaaaacctgtgattttcattcaactgcattcaatctatagatctatttgcagagatatttcacagttttgagtcttgatctttgattgtggcgtatagctccatatttgttttctttgatacatctcaacatggttttgtaattttttggtatacaaatcttttaaatatattccacataaatttatccataagtttttcatgtgtttttgttttgtcctttaaaaatgctatattywwagtttcaattcccagtatttctttgctaatgatgagaattacaggagctttctgtaaatttgtctagtatgctgtgagtttgctgaacaaatttattctagttctagttgcccaaggattctttagtatcttccatgtacgtgaatatcttgtttgagaatgaagacagttttgtttcttcctttatactatgtatgctgttagtttctttttcttactttattgtactggctagggtctccatactgcattcaacaggagttggggaagtaaacatcctctgttcctaatcttaggggtgaagcactcagtattttamtgttaaatataaatacacattcttgtaaattcccattgaagttctattcttgtaggctgagagttttattacrgaagggtgtgtcattttgtcaggtgcctttttgcatctgttgtaatgtttatgtggtttctgtcttttattctgatcatatggagaaatgcagtaattgattttctaatgctcaacaaaccttgcttgtctttgataagtgccacttgctttgagaaaygcatgcatacatctctctgtatatatatgtgtataattccagcattatttctatatacatagaaataataaatatacaaataatgctggttatatttgctaatattttacgaattacgggatactggtctgcagttttcacattttgtcttttttaggctttattatcggggtaatgctggcttcataaaatgaactgatgtattctctcttgtactgctttttaaaattgtttaggattggtattttttttatttaagtgtttaaaaacatctgggcctggaattttctttgtgggaaggttattacttaatttaaaaaatatatgcaatactattaagattttgaatttcttcatgactcagttttggttatctgtctttcaaagagtttgttttatctaagtggttgagtttattggcattaattgttcgtaatcttctcttatccagttatccctctcaggtctctagggcacgccatgatgatgctattccactgcccttttttccattcctggaatggtacttcccaccttctaaatcagtcttgttacaggtttattcattttctcagttctgtattttattgatttttatttttttgttattttgtgtattttactctctttctactttctaagatagaagcagtgggtcccactgaagaaaagcagatagcaggcactaaatttccctgtagggttaactatgtcagcctgacagaccccaggctgtgtgtctttggaggacagagacattggaggccgttcatgatcctttctaagattggtcattgataggaaactttgtttgttaagtaatataagtattcaaaactagacattaacttctaagcagtgcttaagcagcattctacatgttttgatagggattgttttttaatatcactctgttaaatatttatgtactgtaattattgtaaatggtgattacactgttccatgtgcatttgcgagaatataccctgccattgtgtgcagtcttctataaatgtacgttgggtcaggttgttttggcgtgttgtgcaggtcttccctatcttctgactttgtctccctgttcaatcagtcgagaaaggagtgtcgaagtctgcaactcgaattatggatttgtctcttttcccctttggttctgtcaactcttgccttgtgccttctgtacatttgctagtaggtgcctaatcacatgagatcatgacgtcctcctgatgtgctggctccttaacagtatgaaatgtactctttatctccagccatttttcttactctgaagttactttgatattaatattgctagctttcttgtgatttgcctatgcatgtgttatactcttttccatccttttgcttttgatctatttctttatatttatagtgtgtttcttggaaccrggatatagtgatccagtatgcaagtctgtactttttatttgaaatgttttagttaatgtactcatcaataggtatgggtttagtctgccgttttgctgattttttcatttgtactttttattcttcattcctgttttcctaattccctgccttcttttggattgaatccttttttgatttcattttataattactattgcgttattagtgctacctttttttaagtagtttgtttagtacagtactttttgttagaaattccagaaatgatggaatgcgctgtatccacactgtccagtatggcaggcactggccacctgtagctgttgagcacttgacatgtgactcgggcaactgaaggaactgggtatgcaattacgtttaattttaaataatttaaatataaatagccacttggggatacctgctaccacactgggcagggtgactgtagggtttctaatattattgttaacttctcatgatctacattgaaaatggtgttctgtgacgtcacatgcaatgcaagaccttcaccacagtgaacttccatttgccccttgaagtcccatgtacacggccattgatcttacttctacatgttatagactctcaaatacatggttgtgactttttcctttaaacagtcatttgtcgagaaataatcatttagaattgaaattgaaagtgagaaagtactcttttcaygtacgcattttgatgttctaaatatgttgaaagggcgcaggggggtttaatgcccttcatcagatctrtgctaccttgtggacagtaattggaaaggatggggaacagggacgcacgagtgggtagatgaatgcgaggctgttgaaatggttccatggtgagcagtgcatgrttgcttggaacaggaaggagcggaggtgttaagaagtggttgaatttgggatctctttggaagtatgatgctccagctgttatcagcagagctgtaagtgaaatgtactttgattgtttgttgaacatccttgccrcctttcctatcgaatttgcttttcaaaaatagtgtggacattaaaaagccatccccatgtgcctaatttcaattagaaaatgttgaatcactgtgaatttggtgagtcatcctgcatgtaagtagagctatccatctaactcttagaatttgttaactattaagagaggaagacagaaggtaatatagagatgactatttatgagtcattttatttattcattatccatctaaagagtagcaattgattgtatcacagaayggtgtttgttttacatcttttgattaggagcagtggtttatggcatagacttgcttaatttcctcctgtttcttcctctggagtggataactgtttcacaacagaaggcgataaaagatttctggtttattcattaattttgctttgagacggaatacctgatctcaaggataagatgctgattggtatgacctgaatcgaatgattagcagtatgttgcccttactctgatctccccacagtgtgagagattttctyaycttcgcatcagtttttagccatgttttggtgtttaagcagagatacgrttccactttgaaagctctggaagtaattctcagatcacatatattcatctcaaatttgaaatctggagtgtttgtcttgaaattaaattgtggtattgtaagctgtcagtggmatgatctgtgctggaacctgatgcggtctagtttacacggtaytgaatcatgtaagtatctcatctttcctctttgaattcagtatgacttcacataggtgaggttagcttttaagtgtacacagaggtatggttaactatcagcagacttcagttatcaattgctgatctcagaaagctaatttatctttagtgtccaataacattacatggctttctttctttgttttatgttttgtgtatatgtgcttaactgtttaaataagttctggattgcatccaaataaggtttgatatgctctcattaagaatatgatattgtgaataaatgtaatcctgactttcaataaatggcctgtaaaaaaaaaaagaaagtatttagagttagtgagttgaggggcttcgtcacatggctaaaggagatttgagtagcccctggaatgttgagtgactctgacttgtggaatgcatggagccccgtttcgttggctggcaggatctacgtgggccgagcatacagccctagatgaatgacttatgtctctgaattctgttcctaatctctgctgctcaatctgtggccacctgcagaggagccagccggatggcatcgtccttaccgagctctctggktgtcagatccttcactactccttagtggctgattactctgcgtagtgtagggtgctgtagggtgcataactgattagtgccttgcagatataagcaaagtttacaatgaagcccttgcgcttaggagcatacagtctagttatgaagagaagacacaaaacacccagtcacatcactgtgaacagacaagtttgccaggagtctgttcagacctggtgctccctgagccgcgctgagcagcagttcagyggggataccaagttggggaagatgccaagtggtaggaaggaggctggggctctggtctgcacatgccagctgatggagtttggagttggggggatatggccagttcccaatgcactggaccagccaccatccagaattaggaagtagatcagcccgtgcctggcatgcattgctttcttttcagtttctaacatatatataacctttttaagtatatatatatgtatgtatatatataactttagttatagagtctcgctgttttgcccaggatggagtacagtggtgcaatcatagcttgctgtagcctcaagtgatccctcccacctcagcctcccaagtagctgggactacatacgtgcaccaccacgcctggctaatttttttgaaaggacaagtcttgctatgttgcccagactagtcaccaactcctggtctcaagcagtcttcctgccttggcctccaaaggagttaggattacaggcataagccactgtgcccagcctaatctatataacctttcaaacaggtatctscatttgtatactaggggagaatgtagaccccacaccctcttcctcaagaaacaacttgaacgcatgccattctgccatctcagccaaggcgattgcctgtgcccttcccaagggcttggagacaccctctccctgctagccccgtgcaggggtcttcccatgtgtaccctgcagcaccgtccacctgtctgagttcgatggggcctccaggccccctgccttggtgaggcaacacgctcagcgcctgcgcgaatcttcttgcccatcagttccttttccttttatccaggatttcacacactgggacattttgtgccaacaattattaatcagttttaagattgactgggtttrtggactgtgcccagggtttgtgcacctcactcacggcagatttcctggcagmcctggggatggtcctgctcccccggggacagtttccatctcatggtrtagctttgggagtggggcccactgaagaaaagcagatagcaggcactgaagttcctgcagcctgttggaccccgggccgtgtgtctttggaggacagagacattggcctacagtaaaataaagtcagatgagaaagggtggggaggctttcctgctgtaaagggattatgtattcatactcgaaatagggatacattargggaatagattgtaatctctacatccccaatccatgaaaacaaaacagaaatggagggccaagaaacctacacagggaagacacgaaatagcaaacatacctgatttatccaagrgaaggcagaggagggaaacgaaaggatgaataacaggtgaggcaagcaggacataactcgtaggatggtcagcatgcccagygcggcggcgaggacttcggaagtcagtggacccagtggagactcagatgaaaatcagagatggtctcactgtgggaacatggtgtgcaaccatagactaaggcggcacaccttaaacatagcctaagagatgcaccgtgcagggcaggcacccacatgaagyggctatgtaaacgtgacaaagtagatattaagaaaagtaggaaggaacagtaaarataagatcagatatcagcaaagcagaaaatggtattacagagatgttaacaaaggcagaaattatgtccttggaaagagtcgtaaaaattttyaaaattcccagccaaacctgatgaagaaaaatgaaatgacaaataatataaatgaaaaggaaagatcactacagaatctacaaatattcaaagataatgaggatgttatttaaaactttatgttgacaaatttgacagtttagatacaatgagctaagtttttgtcagagcttaacaatttaatctaaagaaatcaaaaattgaaaattaaaaatcttccctcaaagaaaaatctaggcccatacagcttcactgttcagttttatcaaatagttaaggaagaagtaattccaatcttatattagccctttcaaggaatagcagaagagagaataattcctagcttgtttcataagaccaacacaaccatgacaccaagatgccaagatgtgtcaaggatgtttgagaaatggtaaccacagaccaatgtctctcatgaacccaaattttaaaatcctaataaaatattagaatgtcaattttacaatatagaaaaatatgtatatttccagtggggtttattccattcaaaaatcaatcggtgtaattctccacattcacagaggaaaagaaaagaactttatgatgataatgatcatagtaaccaaaaaaagcatttgacaaatttcaacatccattcacgatgaaaatgcactgcaaagtaagaatataaaggaaattctcttacatgacagcgtgtatacgagtgtgcacacgtgtgtgtgcgtgtkcatgcatgtatgtgtgtgtacacrtgtgcacctgtggttttctctccatgtttcttccagtactgatcagggttgcttgttttcaggagttttcaagtgctctaccttcaagttttccccagctaaatctttcccatttctttctctaaatccctttttgatatttgcagttmttttcaacttaccaccaatattttagtcttgattagaatcttcccagaaaagacaagttttccttctgattcccacatgtcccttcagctcgtgatggcgcagaatatgtttgcttgccagttaggggaacctgaggctgccttcctgggcagagtggcgatttgtactgggccracrgggcagccactgttacttatggacaggtggactaggctctttttcatcctgaggaactgctccgcgcttgggaagagccactggagtttatcagcctgcgtgtaagcatgtgggaagggggatcaggaacatttagtagaatagtccgtgctccaggtgatcagtccccacccacccgcatgcctcwccttctccatcccacccgcattttgggtcattgggggattaatttattcgtgtctcgtaagcactggcagaacaccacccgtgtgaacagcattggtgaagcctgkggagttctttttgagacttccttgagcttccggcagcacgtgtgagtttcgggggtgattggaatgtttctccctggagggaggcctgatgccctggagctggctccagcccgagccccgcggcrtgttctgcctgctgccgcctacctgcagggagacgcctgagctgggaaggttctgagggttggcagggtgctctgctgtgctctttgggaggatccccttggctgttctgcatgcccagggccgtgctctccgtggaaatctatgttggagacgacaggctccggttccrgctacaccagcctgacttccrctggacagtgccattttctgcctctgwtaacaccgtggtgaagcgccttacgtaaagcaacagattttttgttttaagatgcactataattactcttttcagaaccaataatattaacccagtgaagtcaaaactgaattgttttataaactgactatggagctggtgtaaggagatgcagggaaggcttctcatctgagtcrgtagcagagtacatagtgcaagaagcgtgggcaggctcccagcgcacccagagatcaaggagagtgatgggtgctgcccgcctctgaggggacggaggcagctgccacccgccgtgtccctcacgctggctttcagaaggcttcacgcaagtgggctcacaggcaagaagaaaagctgtgggccgtgtgtctcccttggctatggctcagttttaatgtaattagaagctcaacttgaaagtgagatatcaaaggaagccttcagttgctgaagatgggtgtgctgggggatgagggcgtgggttgaaaagtatccagtkactstttttctcacgtggatcagtctaacatatgtgactctggtaattgaagatggtgacaggctaaactaagctgggattccccagggagagactaggatttctggaaccagtctaacaaaaacagaaacttgaaggagaaaacagaatatgcctccctctcttccctgcttccctcctctactcaaaaaaaagaaagaaagaaaaaagcagcttttgcaatgaagaattcagtttttcgcccccgagtgtatgatggtagtgactttggtgttcctggtgcagacctgtatttttttgtgatgtcttcatctggcccctcgccctccactcttcatgatgaatatgagacctgtgcactgagggtcctcaccaacacttccttcctcacagccgtatgatttcatccggaagcggcctctaaaaataaacaccctcatgttagcctttttccaccatgcttcatatttggctcttgtataaatatctgccacgtttccactgggaattattgctgttatatattttayagacactcgactgtcatctaagtggcttattttattcccatagctagaagaaaaatacaaaaataattttgtaatgtgagtgtgattgtgggccaggagttatgttctgagaaggagctgagagtaaattatattcctgctttattgtgttgatattgtcttccctgttgtgtcctgagttagcctttgttgttccaagttattaaccagaggtggcttgataatgacgccactttggaagcgtctggctggtgtttaaaactctagctggtgataaatatattttagtcctattaatgaagaattgtaacattttagtcctattaatgaagaattttaacatccatgcagatgagcggcatcctaaaagcagcttcagatgctttggggtgttttctaccgaagatgcttttgtagaaataccgccttscttttcattttttacactggtctgttcatcaaaaaccataacttcatggaacttgcttctgtggaatgaactaaatgtaaattatttttccaaaagctttatgagtttatcatacatgttttggaaaaagtggaaaaacactaggaagaagttccagtgagcaaatgtttcccgacatgtttcacgttttgctctggtttgaagcagggcgttttgtggaaggtagggctggtggatcgctcggtcgctgggcagtgctggtcactgcctttctttggttgagctggtcttgagtcctggtacctgtgtctgccctggcattgaccccgtggtrctttctgtgcatctccgtgctcacctttctggaacacagcccctgaacagaatcatttggcaaaacatcccagtacaaaaaccagtgggttttacatggggaaagaactcaatgagtccacagttcgtgtcgatgaaggaggcactgcgtgttgggctcaaacgcatctgnaactgtgggtgccaagagacaagtagagctcagactgctgggagcgttggctggaataaagctggccctcacggggctgttaaaatacttgaacttgaattcaaagtcagatttaagctgacttcacccytcttcccttgcttctgaagattctggtttttcacgagacagaaaaaagggtggaaccaggagcttatccccttccttccttccttgcaagcagcagcaacagccattgaaactcaaagacagcaagagctctcttcccgcccactcccagcgccactcccgggggaacccatgtgggaagggctcttcctgacacctctcctgcagcacacagcacacgtcagccttgccctgcatgcagccttcccagctggagcaggtcccaccagcgccctgccaggcggcratggtctacaccgccattttaccttccccaggtctgtggcattaggtcttcccttgtgagtggctcgtattcttttcaagatactgtaaataatttggcatcatatggaccacttgatgcttctatatgaaacatgccttataaacccttagtactgcatgatttcagattacggaaatatctgcatgagtattggytgcgatatctctgtactagaaatttcagtgctacctctacacaaacagacacactggggatgtgctgtgtgtattgtatgagtgtatcatakaatatttcattgtccgtggtagtacatttcacatcataggctgtctgtggctactyttaaaccttagacatttgaattttccctcaagctttattctggtgaagcgtgggatggrgtcttagctcactttggaaggatggaacagttaagcagcgtacctggtgactggcactgtgtgtgagtgatgccacctcggcaccttcgcgttgatcatctttaggatctttaggatcactgagaattaatcattctttgcatgcataaacctgtgtaagggttgctccacgtttctgccattgctcacagataaaacacattcatgatctcagcttaatcccaagaggatgtttccccatccatcaaaaccacagtgcaggttttcactgatgggacatagggaaggtatggcaagctgggtggaggtgtgtttcctggacttttccggaataacccaacccatccctcctagtgagcacagaattacccagaaagttgaaaaggaaaacacagtttattggaacaaatatgcaaagtgatttgttcttttcacagagaaggtaaatagcatgtcagccgccaaggccctcacacacacggatctgcccgtggagtgatgaacttgtaaaagaacgtcaggtggaagcggtgagagggcctggacagttgttctgcagstgtgttctttgtctggttaatcgcgtgcgtctccagtctgtggctggccagccgcgtccacctgcgtgctccgggcacccaaggtgcttggttaatatgcagctctctcaacatctcccccttaggagcaacaggtacccggtgctggtgttgtccgtccagatgaaagggcctggccactctgattgcacttctctttgatctccctgtagaaggtcggcttgtctgcctagagattcctctgaagggcaatttaaaagttggatttgagcaacatcaagtgaaatgtcttcccatctcacgccgtgaggagctctttggtgtggctcatggctggatgtgaggaaagatattaacccttcctttgaaacaaactgtctcacaggctgaacttgccagctacctttctcctctgcttttagaaaagaaaatattttctttctcataatgctcttggcccttgaagataaactcattgcagtgtttaaaatttgtcctgagaccctattgcctttactttgttagtgtgtgtgagactgaaggcctgtggatgggtgagatgcttcgaactgatagaaaaagaaaacagaaggaagatttttgtgggcagagccgagacgccrtctctcaaggtgttgtgatcagtaaaagaatccatttttaatggtgaactggcaaaggctgctaaataccaattactgagtaaagtgccatgagaaggtaaagccactttttgtgaattatttcattgcactaacgtgctystactgaaaaacatggccaggctgcttccgatacagttcacttaaagaaaaatggctcacgttaaaaatagttgctttattttgtaaatgttttagaaaagtgcattgctgtccagaaatctagatgtacacttgttttgtgtttaatgaaaaagggaaggaaaaatatctcgaaatcccaaatctcatcggtatcaataggatcataaaagtaaaggcaggaaaaggaatttgctgctcgtgtttcccatccatgtttccaggttatgtattttgtttctcaacttttatttatgttaatgaaaccagtctgctttttttttttgttatttttgatgactaagatcccatttmttaggaatttgtaactcagctgtgacaacgtagcctgagatttacacagtccccgttaagggtagaaaatagagggagggcttagctctctgttttcatagctgtgttaaagagccaaatagtaatttgttgaccgaatgtattatctgtcctgccatatgttgttcaaatgatgagacagaagaatgaagkactcttacaatgtaaacttctggaaatcatactgtttcagggttgtttacattaataacaatgatggcttacatgtatgtatggttttataattttttgagattataaaaggtatacatggtcagtgttgaaaataaagtataaagaaattaaaaatttggacggcgtggtggctcacgccggtaatcccaacactttggtaggccaaggtgggcagatcgcttgagtgcaggagttcaggaccagcctgggcaacaaggcaaaaccccgtctccaccaaaaatacaaaaaattagctgggtgagatggtgtgcacctgtggtcccagctgctcaggaggctgaggtaggaaaatctcttgagcctgggagttggaggctgcaatgagctgagatcacagcactgtaccscagcctggatgacagagtgagaccctgtctcaatttaataaataaataaaataaaaaatgtatatttctattgcataattaactattatttatgttttatcagtccttctaatttctttttttcttaggagacaggggctccctatgttgcccaggttggtcttgaactcctgggctgtagcagtcctcccaccttggcctcctgaagtgctgggattgcaggcgtaagccaccgcgcccagctttctagtttgtttttatgcctacagcgtacaaatgttactaaagtttggattgcgtcacactgcatgtgttgtagtgggatatgcctttttatgcaccagcgtatgcattgtgccacatccttagacatgacttttattggatatgcagtagcctggcttayggatgtttcataatttatttaacaccctgtgattggttatttagcttactttcatttttaactgtaccaaattgtgctgtcatgccatcctggaagtggattgcatgtgggcgccttgtacttgatagagcactttcttaaactgtatctcagtcattagcacaagtgctccatgaggcagtgaggccactgagtagtgatccgggtcacaagggaagaactgrggcccagcgagactgaagcgggtattttcacgtgagacttcgccagtacgggcaaaagcacacggtagaggattttgaaatcaccctgattgaagaccaagctggtttttgtcccaacaatagtgattccttcatttatcccacaaatatttaaatgctgcgtacgtgtcaggcactgtccttggttctggtgaatagagcagaccctgcctgctgctccgggggatgycggcccgattctttggtaactctggaaggcttgtgcacctgctggagtttgggggagagagggagggttgtggacccagtcacataccacagtgggttcaaagtctcatctttattctgggagtgactgggtgtctttaaaagtcaagttcrgaagattctcatttaatgatatttgattccatgtctcatgcagaggaatacttagrtacgacggaatgagttaagtaaagggtaaagtattacttaaatatatcatctgaaaataactgcttcatatctcttgtatcttaaaatattttctggacaaaaattttatgtaaattaaaacaaaatgctgtttttcatcattgtattaggaaaaaatgtaaatacaaaatatttggtgttttgaaggatgggccggaaatggggatgtttttgtatgatgctgctgataacagtaagttgctatcagtcttgtgaccatatacatacagacataaaaatgttaaaacccttctcagtactcccactttgaaaaagtatactctagaaaaatatctaaattatagaaaaaacgttataccttgcagcttctcttatcatggtggaaaggaaaccaacctagacgtccaacactagtgagatcgtttagataatactgacacatgctctcaccaaaccgagtcagcatctaatgcctatgagactgcgtagtcagggataaatgcttccgttaagtgaaaaagcagagtgctaaagagcaggcacattagagttacaaytgtgccatgtgagaaaaagcttgaagtgaatactctcaaatgatgataatggctgttttagggatgaagatcaaggaatttcctgttttttcttgtctgtatttcaaattttttatagtatagttatattactttttaaaactagcgacttcattttataaaatgacttttacttatttttaaaatttaagcaatacaggaaagcaaaagaaataacaattacctcccatctcacagcccccagataagtagtgctgatacttggtgagcctccttgtaaaagtcactctttgcttgcataaacatgtggttatatgcataaaagacagtaacataaacacagrtaaaacgacaaatattttcaaatgacaatagttttgtttaatacaaggttcttaaatattgtctgtaaagaaccagatagtaaatatattagtctctgtctcagttattctgccgttttgtgacagcaatcatagacaaaatgtaaatgaattaatgcagccgtgttccaataaagttttattgstcttcattctgtttagatccatttccacctggcatcattttcttcttcctgacagtttccttcaccctttctcattgcactggtctactgcaggtgacttcttacagttttttagtgcccaaaatgtctttwttgcttcttgattgttgaaaggtattttcactgggtgtagaattctagattgacagggtttttttcctcccaatactttacagattttgctacactgccctcttgcatgcattgtttccattaagaattctgctgtcatcctcatctttttgtgcctctgtgtgacatgattttttcctctggtaggttgtaaggccccttatcaattttttgaacaattttattgtgatgcatcttggtgcagttcttcatgtgtcttttacttggtttcactgtccatcttgtatctgtgcatttgcagtttgcatcaaattggaaaatattttggctatttcttcaaatatatttttttccttttcctttcagaaactccaactacagatatgtacgatttcctgaagtttttcaaaacctcactgataatccttccttcctttcttccttccttttgatttcctttctctgtcctcattttgtgtagtttctataggaatatattcaagttcactaattttttcttttgcagtgtctaatctattattttcatttgatgtatttttccattgtaggtttttttagtttttaattctgaaagttctctttggatcttttttttactatattctataattctaattaactttttgaatgtctggaatacagttacattaactttttgcatcctcgtctgctaatcttaacatctgagttagttttaggtccatttcaattgactggtgtatttcttcgtaatggatcatattttcctgcttctttgtgtgcctggtaatctttgattgcatgtccagtattgtgaattttaccttgttgagttctggttatttctgcattctgatagatttccttgagctttgttctgggatacagtcacagttaaattacttgggaatagtttgactcttttgggtcttgcttttaagattcgttaggtagaaccagagcagtgtactgaggccagcccccttttcagctcgccccggatggtctgtgaataggaggcattccagtgtggctgtcaggaaaagtcatgctcccagccctgcaagagcagcggttaccaccctgtcatcctcacagatagctcttttcctgcctgggggagcttcctgacatggcggtgcccatcagtactctgatgaatatgtgagggtgacctgttgcagatctcaggattcctctttctgagatgtgtctctgtccctccagttctgtcctgcaaactctgcctgtcctggtttccgggctcacagctccatcccctcagtttgggagctggccaggcccttcctgtgtgcccctccgggtgcccggaactctcagggcagtcgcagccttttcttccttggttttctgtcactcatctgtctctgtactttgctctccagtttcttgaaaagtgtgttctatttaatttattttttctttttggttctttttggtgagagggtcaatcttgtctcttacttattttatcttgcctggaaacagaagtgctggggtgttttttaaaaaataattgtaagatacataatttaaagctgtgctattatagtatttacatgaagttttaaaaagaaatttgcttcccctaaactttctgatcatcgatagcactttttgaggcagggagccactagtggtcacctatgtctgttagcaatagacagacatgtctgttacttccaaaggactctcacagtgtaaactgaggaccctcttacaagctggtacgggaagaccaggcctgcatctgtcagagatgagaataagacagattctcctaatcaagctgcaaggagctcctgctgtaatcactccagaatatatatcaagagtggatgtgtgttctctatggcaaaaaacaggcactggaaaatttacatatttttagtttaaaatatgcatgctcttggccaatatgtttgaactgaaaaaagatagaatgtggttttctgagttatcttctttttcttttttctcaagttagttaagatttataaggtgcttactcagaaattcatggatgaagtacaacgttcaccttcacaacactttgctctggttacaaatttttgtggtgtagaaacccccaaagtgcctcgtattttctcacccgagtccagccggagatactgaccttggtctagatcgtcacctctgaaccattcctgaagaagtgggtagacaccccctcaggactgctgtaagagtggaacacattcacgtataaccagcacagaggttagtattcagtaagcactcaataaatgttggctctgaagagattcttctcatttgcatcattgaaaaggggtctttgcaatgatgcttatagcccagtttggggtgaatcatacctctaagcaactgtcattgaaagaaggccttaatgctgatagtcattgtttcagttttactttttatttctttgtcttggctctctggctaggcctttaatacarttttgaatagaagtcgtgataatgggcattcttgtcttgttactaaatttagaggaaaagctttcagcattccactgttgatttcctgtgaactctatagattgttttgtggatacccattttcccccagaatgaaagatctttttgaaattatattattctttctttaatgaggccattttcatatttgcatttatgagaaaatgtttaaaaaagtatgtgaacataaattatataatcttttgagtcaatcagaattatacaattgaaaaatagtctacaattaatgatattcaagtatctttagattttaaactcattaaatgaacattgaaagttctgttttctaattatagagccgagtttaaattgacaagagcagccacactcgagttgtctaagtcagaggctttataaacctgttggattttccaagggttgcttctcttgaataaaggtgtttttgtttctcacatattttacattttcaatgacctgtttaggcagaagcaccttttgtcactaattagtgtggtgtgacaagtaacataatgcgtatctgaaaagctccactgggtgtaagtggagttcacacctcttaatgagtgccttcaagagtgtttttgtcattcccagggagaactagtgccccttgaatagaaaactgctgtaaatggaaaaaggatgtgtcttaggagcctggtgtaagtgcagatgggcccaccctgtcctctgactttagggccttcctcaaagccaaggccctcttgtgcgatggggctcttctccttcttagaattcctacatccagagtaatggagacgacttgggatcatgcttcaggatatatgtaggtgctcaacacaggctggtttctgtttttaatttctggcagaatgaaccacttgaaaatgaattttcattacgattttaggagggctgagagtagatgaggtaagagatctgcctagggggcaggatcgaaggaggctgtcactctcagatttgtgcaagtgacttgtgttccccaaattcacatgttggagccctagccctcagtacgtcggagcgtgactgtatttggagatggggcctttaagcaggtacttaaagttaaattggggttgttagaataggccctaattcagcctgactagtgtccttataagaagaggagattagggcacagatataccataggcttctgtgcacagagatgaccatgtgaagtggcagcaaggggtggccgtccgcaagccaagaagagaggcgtcagagaaaatcaactctgccaacaccttgaacctagacttgcagcatccagagctgtgagaaaataaatgtctgttctttaaaccacccggtctatggtattttgttatggcagcctgagcaaattcattcagcaagtgccagccttgcactcgcgggagagtgagtgcctcctgcagtgctcagtctggtctcaggctgaaattctaggtagatgcacattttcccagttggcaggtgctggctcatgctgaaggggaacatatgctcaggattcctgctttatgtacttcaaaaggagacatgtgacatgtttcacttaacttcatctaaatttcctagacacaccaatctgtaacggtttagaactcaacccggtggttatacagctttcctgaagtggagaggtgggctacttatcttgtatgagtcccatgagaactaaagaacaatggttcaaaaaacagatggatgtctcccatcttacattccctccaggaagaartagttgaagaaataatggatataaatttccttgaattaagaacacatgaaagacttaagaataagaagtccaagagaggaccaaagaggcaaaaaaaaaaaaaaaagaaaaaaaaaagaaaaataactgacgtctatctagaagagcacagtgaaatttaagaatagagagaaaaatctaaaacattagcaagaacaaacaacacatataaagaaccagtggtcatattggcttcagatttgtcaacagcaatattgaatgtaagaagagaatggaggcatgttttcagcgtattaaaggaaaataacttagaacagagttttatatgcagctaaaactttaaaatatgagggcttggcaaaactattctcacaaggcctcaaaagttacaccttaacaattataataaatgtaaatgaactaaactcaccagtaagaaaaagactgaaaaatggaataaaatataaaatccaaatataygccactcaaaggttatccaaagtataaggactttcaaactttgagggtaaatggatggaaagaagcatgtcaggaaaatacccaaagaaaactggcatagctataatgatatgtaaaatagattctaagactaacagccttgttagagatagaaaaggtgaatacacaataacaaaacaagtaaaatagattaacagagtaaaacataaatgacaaaaataatttgtattcttgaaaatatatagccatggaagtatacattttaagttagaaaatgaacagaataaaccttttaaaaagcagaagaaaagatcattggaaattagtggaaaaaatacaaagatcttaaaaaaccatgaattgtttgtttaagagaaaaaaatagattaaaggtaagatatctgaaatggctatattagcattagatgatgtatattctacaaaaaaagttactagggttaaagagagatgttacatagcgataaagtattcagttcaccaaaaagacctaacagtcttaaatggctatgtacctgacaacagaattccaaaatacatgaagcaaaaacggaaaggagaaatagataagtccacaattataaatggagatttcaccatttcttactgatcaacagatcctaaaatcagtaaggatatagacaatttgaacagcattatctactaacttgatgtaattaacatttctggaatacacttaacaaaggccaagatgtggaaaatccagaatatttgaaagttcttagtaacccatcattcaaagaagtcacagggaaacttagaaaatgttttgaattaaatgaacatgaaagcacaacctatcaaaagctgtgggttgcggctaaaagtgtgctttgagggaaatttataacattaagtttttataatagcaaaaggtctcaaaacaatgatctaagctgctgctttaagaaaacagaaaagtaagagcaagtcaaacccaagacaaacagaaggaaggagataataaagataaaaacaaagatgaataaacatggaaaacagaaaaacagtggaaaatatcaatgagtcaaagaactggttctttggaaaaatattaattaaactgataaatcggtggctagactgaccaaaaaaaaaaaaaaagagagtgaagtcatatattaacaatgttatgatgagaggggccattgctacaaaacatactgacactgaaaaaaaaagtgcatagcaggacagtttcgctacccatatgtttgactgcttagataaatgaataactttttttttttttttttggagacagagtctagctctttctcccagcctggagttcagaggcacgatcttggctcactgcatccttctcctcccgggttcaagtgattcttctgcctcagcctcctgagtagctgggactacaggtgagcaccaccatgcccacctaatttttgtatttttagtagagacaggattttaccatattggccaggctggtctcaaactcctggcctcatcatccacccacctcggcctcccaaaatgctgagattataggcgtgagccactgtgcccagcctgaataacttttttgaaaggcacagactaccaagctcattcaagaagaaatagtcttaaatctatcataataattgaatttataatttaagcctttccataatgaaaatttcagacgtagttgtcttcattggggaattctacaaaacatttatggaagaaataatgtctgttctagaaaattcttccagaaaatacacgaggaggaaatactttccaactctttttatgatggcagcattaccttgataccacaaccaaataaagggattagaagaaaattacagaccaatattcctaatgtacataaaatgcaaaagtcctcaggaatattaccaacttgaaaccaggaaatayataaaggatgatggaacatgaccaacttgagtttatcttatgaatgtaagactgttcagtatttcacaattaatcagtttaccatatcaataggaaaaatgaagataaacctgtgttaatctcgaagaaatttcctgatttgataaaaaggaatctatcaaatacttattgctgacataattcctaatgataaaagattgaatgttttcctcctaaaatcagaaataagacaaagatgtctgtccactcttcctacagctattcagtggaaggtcctagccagtccagtacatcaagggaaaaaatgattttggaaaagtaagaaataaaactttatttatagaaggcatgattgtctatacagaaaattcccaaaaacctacaaaactacgcaacatacaaaaaccaattgcctttctatatactagcaatgaatattggatactaaaattttaaatatagttccatttataatagatgaaaatgtgcagtagttcatgtccaatgatatttgcaggatatatatactgaaaactacaaaaccttaaataaaataacatttaaagaaatggagagatatactgtgttcttagattggaagactcaatattctccccaaactgatggatttaacatgattccagtcaaaatcacagcaggtcttttcctagaaactgataagccattctgaaatctatgtggaaatttacagttgtacaagttttccaaaattatttttgacaacccatcactagagaatgttaaagtaactgatcatataattccttcaagaatggtcattaaattctggatttcacagtttcttttagttcgtatttcacaagatagaagctttacatttttcagattaaggtagttttcacctttgtgcatgctacatcttggggaaaatactgagacaaaatgactcattggaattatttttgattttttgatactcggctgacaattatagtctgtgttatgacagttatagcctgtgtcatacgtactcagaattaactaacatagtcttcctcctaacttccctgcatattggaacattagaattcttttggttggttgaagaaacatcctagaattttaaaatattttgtatctaatgtaatgctgaaaacatgaaatccacataatgtatgcggcatagctaatattagaagcatgttcaaggagcagcctctggggttaatagagtttaatttgcaagacaaatgaaagcttattttctcctaggctctctgctcataattctagtagggccacttttgaagaatagtaccttcarcagacacagagaacccttgttggacagcaacagaacttgctcacagtgagacccgacatcccctccgctcagtgggcatttcctacagtgcagagttgtgcgttgaaaagygcctcttcactccctacatgaggttcctcacacaaccccgcacctgggcgggcgggcgggcgtagggggcataaatggcttatccctatgaacttcatcattatgaaatgtaaaaatggacagtcccattgccccagaaacagtgggggagcttytaagtaaatccaggtttatctgcatttgggaatattctgcattttttgaaaatgatgttcccaggaatctttataaccaaggagaatccttactgtaaacattccacctgaatttttccaaaaaaaaaatagatcattaagaacaatagacaaaggaatatgcttttaaaaatagtgattatctctgaaggtgggattgtggctaatttttaactaccctggtgtgaccttatgtgaccctgtgtgagtcaacatgtctggcctcaggggtgtgtgtggagggggcaccctttgccattgcattacacaagtctttgaactgactgtccttcttactaaatgctattagcatctcttagtcactgtggcagccaaaaatgcttccacgttttctaagcattccacaggtgtatgttcctggcctgattcaggatagaccagtaactcctgaaagtaatcaaaggggccggctattgtggctcacgtctgtagtcacagctacttgggaggctgaggcgggaagaccacctgagccccgaagttcaagactgcagtgagccgcgatcccaccaaggcattccagcctgggctgcagaataagaacctgtctcttaagaaaaaaaaaagaaaaaaaggtaataaaagagcaccaggaagcataggtratgcacctcccatgtagagaaggctgggcgagcgaatgtgtagtggtttctgcggctccattgttagtgatgacttacggatggaaaagggagttttgtagctgagtgaaaactgttagaaaaccaaatgccgctgtcatgtttttgtctcgtgcgcttccccttcaccttcatccttgggcccatgctgtggccaactgaggagtaccctgaggttaagcgtcccccatggcaggtgaggctgtggggtgggaggagggctgggagatagcagattagagatctacaagagaatagaaagtttgattcaaggagaaaaactggagtaagcagtttggagaagtcagatgtttaaaacatgaaaagaaatgtaactttgagttgcagtggttttgagtttcctgatcttgatgtgccagtaactccctgggggctgacaaatccagggggaaggttcaaaggcagagagcctgtttgagctgggccagggcacagaggcttgctcagaagacgtggacggcagcagagcctgggcttgagagtcgagctccaccttcttcaggctctttccagcggggcgggacaaggacccacacatgctaagcgagcagggaccctcaagcctgtgactgttcgtgccagtgaaaagggcaccagtgcactgatttcttccgttcacccagaaacaacgatttcttcaatgttcacagtagtctgttaaccacctcttcgtggtgcatctttgagcctgtgtttacagcagtcctctctttggtcttaacaacccaacgtgaattttgtggcatgctacaaattgaggcatcaaagctatgctttttacattgacttttgagaaattcgacagagttctgaaacccaaatcttgacctttcatggatatgatggtaacctggcttgaggttttttttcatctctttcccaaactacctgttctttccatcggcattttaagtagcttgagcacttggtttcactcttcaatactttgatgatgcgaatatctgcagatgcctactgtatgcccagcccagcctctctacagagagaccttcccagccagccccggtctaacccatcatgctgttgagtgttcttcctagcagacatcattatattactcatgcattcattttagggggttatggtctattccattgctcccctctcccagagcagtgctttaggggagccaggtctgtcttactcccggtacacccagcacctgtaactctctagcaaatcctagatgcttggtgagtgagtgagtacattgaagtacattgagtacagtgaggccacacaatttaaaaagtgacaatggcagwacactgcggcatgtgctggaaaatgaagtccagggtgctgggtggcctcatggcagggaggctcccctaggctggsgtcggggccaggcagcctgaggatgtgaaattcaagaggacacagcaagaggctggaaggaaactagttggggacaggggtgagaggactcgattgaaggggtcccactgcaaagggccccatgagcccatccagagtgcttgggttccccccctgaggcctggtgagagcccgtggaagggccgagcctggggagctcacaccgaggcctcaattcctgcttccctttcagacacgcattcatccttaactctttatcagaagggaaataaaacctcccagatagcttggttgtgaggattaaattaggaaaaaaaataaagctatagctgttattggccttgcccggtgctcctggaccgtggttagtggatggagcctttcctcatcctccagcttcttgcctgtgtttgtagggctcacgacagcttgtaattatttcatttgtgtgggtcttactttttgcacatctcttcactgcgtggcaggtcctgtggaggcagagcttgggtctgttttgtccactttgttcccagtccaggcagaaggatgggcagggagtggacgtccagataatgaacctgaagtgagtgaatgaatgcactaagctcaagtcagggttttctttacatagaaattctcccacgctcctttttgcttttagtcttgaggatcaacagtgttcatgtactaaatcaagcctgaaagccctttttttttttttttttttgagatggagtcttgctctgtcacccatgctggagtgcagtagcatgatcttggctcactgcaacctccgcctcctgggttcaagcgattctgctgcctcagcctcctgagcagctgggattataggcgcccaccaccatgcctagctgatttttgtatttttttggtagagatgaggttttaccatgttaatcaggctggtctcgaactcctgacctcaggtgatccacccacctcagcctcccaaagtgctgggattacaggcatgaaccactgtacctggccaaaagcccacgtttggcagggtggctggcagccttggggcctcatccacggtgaggttgtgtttggcctctctttgcaggttgatggctggaagggggaagggttctgtggtcaggcctgtgcttcatggagatgtctgaccgttgggactgtacctttcatcctttggatgagatgctctgccttgaggcagaagcatggaaagccggtggatttgtgcgtgtcggtggttttccactgggtctccaatccggactcagcattgtgggaccaccagtggctccccctgccacttcttgtggacrcgttctttctccttagagcatctgttccaggccagcggcggtgttactttccagcctggggatgactttatggcgtgatgtctaatctccagtgggcaagtggtgaaggtactctagcatccatccagtggccagtcggccgagggcctgtctgctcatggggaagtgtcctctgatggcagcccagtgtcttgctaaccagcagaccactgcagaaggcaacgctggcctcctagaggtgtggcttgtttgcatctctatgtttgtgaccaagtcgtttccttccttggtctcagaatctgcttggcacttactaatagcatttgttcaacatgcatgatcccggtatgtgaagtacagatatgacatttataagccagacactgcgtttgactaatgttggcaaagtcacactaagagcctcccagtgttcagatggcggaagggaaggcagataggagtccagtccccaggactctgaggccccaccttgtgccttggtagaagtgaagacagatcgcctggggaagttggaagaagtagccgagacatttctcctggctcagagcagagggggatttacgttggcctatgaaggaagagtaagtatgtagaaccttcacttgtagagagctgagactttactgtcacccttgttttagggagcctacatggcacctaagactcaaatttacatttttaactaactgaagccaaataaaagaccttttatcccaactgggtacactctaaagtctcgacatgattatgcctgtgatcctgcacaaatcgtctcaaagatcttggaaaattggttagtgtcggggcacggtggcagttagtactggggcattggaagcaccagagcttaccttagctagacgtttccatcccgtggcagcttaacacgtggcatcctcactggtcttacagcattatggggaatgcaaaataaggacttgtctccttccagaagcctgctgcccatcagaaatatatatatatatatatatatatatatatatatatatatatatatatatatatatatatatttttttttttttcaggraatggtagagaacagtggagaagtagatgcttgtcaggcgtcttgtctgctgggccaaggtgaatcaggaggtgagagcggcggctttcctcttgtttgggcagcgggtgaaggacrggcgtggcaggctgtatggtgagtgtgggcatggccgcccctccgtcctctttcccctctggcccgtctcgcatctgaacacctgggagtctgtgattagacctgagaagaggaaatgaggggcagttcccttccattttcctcccagccgctcagtccaggtgtgtgtcagtttgcacgcctccctctggaagtccgtgtctctgcgaggctcctcagccccggtagcccccacgccaagtcccatttactcagggtttctgctggtgacggctctaataggcacttcacctgctctgcggaggcgcctgcggaatggtggtcgctctcattagctctgctcacccgcccagcgttacaggcagctggggagggattcaggggctgctgtgttcagcagtaatcagagccccttctgtgcacattcgacgctcaagtgtgtagtttaccacgggagatcaagaaatacgttaaatgcataaaattaaaggcagcggcctgcaggatccccaggtggcgtgtgctgggaattggatgcacttggctgtgtgtgtcacttaggaaatgcgctagggggtcagcagcttycccatcgaagcgttggttagtttgtgaaaagtaaaattccaaatatttgaaataataaggggccagatacgtttggagcttgagaagaactatttcaccagccaagagatcctaaacattttttggcttaatagaaaataatagcctattttgaacaataatctttgtaaatccaagaagaaaaaacagttcatctccctttatagggtctgatttgtgtctgttcaatttaaatagcggcaacagaaatacaagtgtctttgggtgattttgttctgctcttaccaacagatgacaatcacgtcttayggtttttgatttgacagaacggttcatttcatcagctttctagcagcccatttgattcaatttccctctgcagtgttttactgaaaatgacaaaaatgttcttttacataaagcctgcgagtctgtgaaggaacataaatgtgctgtgctgtttacatactaacttaattgtaatttaaatgcccttttcattccataaatatagccataggcttttcatttccttcaagccttcagctcacagagcagtttatatgtaaactggagtcagttgcttcataaagtgaatttctggaggaaataatatagtatatatcaaaatctagataggtaatgggaaattgattgtgacaatacaatattagaaacacatctccataatattttatttattacactttccaccttttgctgtcaagggaaaatatttcatcttgcaccgcgaactccagtctgtagagattttgacctcaatattctcacacaaatgaatatagtgtgtaaggtagcacaattttccctgtgtaaaatcatgcataaaaaacaattcatttaaagcatctaaatgtttccaaattactgcaggtaatttttacagcttaattcctccgagacaccattttaaatgaacccataattcaattttcagactttgcatttcaaatttttatgttgaaagtaatttcctttcttgcttaagttgtgctcagaaccagattcataaaatgtgtatgatgtatgtctgtagaatcagtgactgttagaagcttaataacaaatatgcaaggaagaaattaaatgatttttctcttcagtagttcagtttaacattgatttctaaaagaaatgattctsactttgccgctaagtttctttctttcactttttttcttttcttttttcttcttgcagtgttccaggggataaaactgtccttgtatctgtattttgaatgatttggaatcttttatctttgcatattcctttagaccagaaaagaagttgaataatgttcagactggctcccatgttaaggtagcacttagagattctctgaatatcatccctgaagctatggcttcctaaagacttttgacctcttaaattagtgaagagtggacaccaccgcttaagccctgctaagaccagttaaaagcatctgtggtctgggcggagggagctttgagtacaatggaaaatggcaccaccgtgttcatgcttgcgagctttccatcctgatggctctcctctgccttttcctgtggctgtgggatttttcaaaacccttttccatgtctgcccttcaatagaacactccaagtatccagttttattaatgtccagaagcgtaaatcacagccccctgttttgtcattccagtcattttagtcactaaaggattacttcaagtgactgaactcggctgttatctgtttgagtttttgcagccaggtcatctcaggggactgggaacaagctttctgcccccttaactatgtcgagtggatggctttagctggaccactttttgtgattgatgtacattctgtgtcgctgtatcttcccgcgacrtggtaatgcaaacttagaaaaaaaaataagatggaaatggtgctgcaagtttttaaaatcaagggttgggcagtgcagggggagctattgtttaaaaaataaaagttgggaggaagatataatggattttgtcagtggtattagggcgatgaggcattcttgagttcagcaaatattggcagataattctgctttatggaaactattaaatgtaattggtcacatcagagacacaattggcatctgtactttgaagctgaatctcctcaggttgagagagagaaagagagattaagacggactcttcagagaccatggactacagggcccaaagttataaatctggaagatgtaaataaaggaatattttaggctaacgttgctccaagaagcagtatttgcctgtaagaaatgtaataatagaggtgccaatacaagatagcaaaagttacccaggaaagatgttaagtgacatgctgtcttcatttttaaacaggacaaattatttaattgggaattttgccgacactrttgaagcaattatcatatttaaactgtttatcttctccacattctgcctgtattttttttcttctttgcattaatctttttcctctttagcatctagagagggtccctttctcgtggagatcggcattgtagaccttaaaaggtctcacttgagaaatatttttgatattattgaataattattaattcatgcaagaaacaaaaggaagggcactcaccggctcgtggccagagcagactctcattctttacttctgagtgtttgggggcttctagcgaataatccctggatgacgggtcctagtggttttgagaccaccagtgggtagcctcgccctgggaggggcttgagcagccttgaggtgcttttgtgctttgcacgttcgtaattgtgaacctcaacgcaaagcaggtgttgttgtaaatctggtgtctctgtggaagcaatgccagtcctctaattcatcttcgccaagctagaggacgcgagcacatgtgcaggtctgtgacctaaagcccttgctggccagggtgctattcttacctttgggcttccagaaagagccagctcctggtggagtgaaggtcctacctccagatgcctccgaaggtgccggtacrtgattggaataggaatgcgcatgaacggagaaaaccctcaccattgcgtccttttgttctttttgcgaggaagagatccatgggttggctcttactgaacatgaaatgttggaagtggaacactgcagtgttaccagtgagctgtgtaatcgccacctctgacagggatcctgctcgaggagcacgtctttccttggtgtggccgtctccaagtactttgggtggtggtaaatttacccttctcggtcacacactgtgaagatgtgagtttcccaatttcagcatttggagccatgtccttggtgagggcaggaggaatttgtcaccctttctcgatgtgcctgggactagggcagagacggttagtctcaggagagccaggtgtgccagctgcccctgcctgccatggctcccgcattgtggccaggactttttctggcagtggtactgcccgagggccgcagtcctggtcacattccacttggggacagagtgtgcaaggggctgatctgaagatccggctggaacctgggagccacaggatcctggggaccctctttggctgtaccccgtacctctgtatttgctcccacatgctgtctgatttctctggatggcctggatgcctctgttcccagcatctcctcggcatgctccctgcagcccttggcctgtgtccagtgggccccgacccggaggctcctgccccgtagctcaggtccsgtcttggcctcagccttcccttaggtgctcgtttctccagtacctgcagcaccggcgcttttagattgcattctttatgcattaattagtaatgtggtggtcccaggtgactaataagctaaagaaagaactagtgtgagtgaatttctttaaaggtcatttggctctaggaaaaccttttttttaagaaaaaaaaaagcattttatagaaatgttcaatggcaaagtgaaatgtaaagtattacatgttttttactatagcgaacaaattgcccctttttattccgtttatgtcttcatctgctacatttagccagatatatttgtctacctaattttctgcaaactggaagacataatcccccaatgtgaaaacaccaagagttacatgatgataattataactcatgaggggaaaagtgtcgcctatagaatccataccggtcgtttgcctgagagaacgtgctcatcctggccctgttggattgtctccacagatgtttttcatttcgtatttggtttgattaaagacaaaattcacccatcaaaaggaagaacggccctgcagagtgtgagttcttcattcgagagcatgtgctagttaaaaagaaagaaaaaagatatcttaatccaatttctgagctgcactgatcccaaattgaactgaatttccattaataactcaacctaaaaatcctttaggtgttctctgggggctggaaacagaggccggtggcgtggtgtgatgttcagcgttggccaggatcacttgcttcacccaggtgttgggcctgcacactgagtgcccgagaggaaaggttccgggaaagctgctgtcggaagccggggtttgtgggatcgtgtgtaggagtagatgtggaggggcttgtgtgaatgggggagttatgaaaccaggactgaagacaacagaaaggccccctgggagacaggtccctggcttgccctgtgcttccccrccactcggggggccggccatgcggagaacactctcctctcccagccaggcttcagaactggggggctcggcctccttcctctggccccagcagcccccgagcggagacgctggagttccagtagagtggagggaaaagtgtctttgacagcgaggtgagctgcctgcctgcacggtgggtcccctgggtgactcaggcccccttcctggaaggcaaagggaggggcacgtttctgaccctcctgagggaacggaggagactggagagggaacattctagtatgtgcgtgcgcccatgcgaaggctttcaaaggcctgagagcagacttcagagctgatcacaaagttgaaggtgggaggaggggagcaagaaagcatcggcactcagagtccccaggcatgggcacctgacacggtgctgtcccccgcagtggctgctgctgttggtgtgcctactgtgtgggggcttctgtgggagaggaccctgtcctccgcacgtcagctgccggagagtcagctggtgccagatggccggccggcctgcctgcctctgggaggcctcagtgcctgttggattccctgccatgcagggcgcacccacggggtgacgtgtgggaccctcccaagcgtgcccgtgcacccatgcagctgtggccgcagtctccactgttttgaatatttgttgtgttcctcctggtaggatgcatgatgttttgggactgtgctggcagctctgtcttccagttccttcccaagcagtgtgggctgagggtgccagcagaatgcccgccccaggacacgatccagtggctctcgggatccctccagggttggctgagaatatatcagtggcactgatcttgtcccagaatgcttggtcgtccggtcggctgtgacaaaagagaaacatggtccgggttatacacagcctttccttgtctttatttctagacaccctttatttcaagactctactccactggacttcatgtccggttattaataagcagttctcgttctgtcatcgagcctgctctggagttaactgtcaaataatctgaactaaaaagttaaatcatataggctttgaaaattagcatccctaagtctctgtccttttgtatttgaaaacattgatcattttccaccccctcaggatggccagtatcctctggatttattgctaacagtaactgctcagtttcacacccatcctgaaaccatttgaggtgatcctgtaattgccatgtgtgtgtattactaatcaaggctgctccctctacaaaacactgagtggcccccaggccgaggtgctgcagagatggcccgtgtgggaggggtaacgcctgcaaacccgaccctgatcaccaatggagtggcctcacgtggcctccctgatggtggcccttgactgtggtcagcactggactggcccaccctatgagatgtctcaggcagcttgcaagattacatcatgtgatggccaatgcttctgctaaacaagaggcagggagccgaatggacaggcctcaggaagcacagcgtggtggccgtcacagccttctgggaaggctatttctgcatcactgaggccccacagcccagggtgtttaggatgaagggcacagatttccagatgtgaagagtgtcaggtgggctaggggcaggagaagcatgaggaggaccctgtgctggggatgagaggagagcggccctgcagtcaaggggccaggtggagccacctttggggatgcggggagaacttggtggccctcagagacccctgcttggagaccccacctcccccttgacaagactkcggcctgtgctgggcacagctggcccagagcgagggccacaccctactactgcaccctccacgcctgtctgtccttgcccacctcggtggctgcctcgcygacccccgccttgcagctggagtagctgtgctgataaagatgcaggtgggaagctggatggtgaggtagcccatctgtggtttgggatccgagaagacggcaagacctcagcttcatgagaagagagacctgaagatccatgctggggaagggcgaggatggaaaggggtgcagggcgtggagcaggtgcccaggtcgggtacagagacaggcctgggacctggaggacctgcacgcggggtcgggcacctgccacactctcccatgtctttgaagcctcttgtggtagaagagaaggtgctcatattttaccttctgtgccttagtatgtagtttggtattgtgttaagtggacagaaatcacatacccctgctcactctgagcctgcatcctttgaccgtcactgtgaacctcagatcgagacaccagcctcagcgggggctgagatagggcattccccattcccactggctgcttggagggctgtgagggacctgctgcctggagcacagggcctgtatgggtgggtaagtycctggagagacaggaggaggcaggggtgtgcaagcctcttgaggtatgaggaaggtggccggggtctcgggaagcttgtctggccctggcaggcaggacaagggccccctcctgcccatacctctaccttaggccccttgtcatgacacgtgatacctgagggtggggggctgtatgggcatttggaatgtgacggcacaagccacagtgggtcacttgtttctacaaatgcctgagaagaaaactattcttctaactcagagaagtgggatttcccactgaaaatcagtggaaatcacttataatggtctttgcaaattccttgcatctaaggaagtgcctgtggagcagcagtgggaggaaaccattcaggctcgatggagagggtgaccgctgcaccctcatccctggtgtcagcacactaccgaggtgctcctggtttaaggacgtttgtgcacccacccggaggtatgcatggaaagaaagcactgcagccattccccagccagtgtaggggtgggacacagtcccgtgggggccccgcggagggcctgggcagatgcagggctgcgcactgccgtggtttcctgtgtgtctgccaggagtgaagacctgagcagcctcactggcctggtgtggaggggccgcctccgagcatgcggagaagtggtttgcatggctggaagtcaatgtttatcygtctttagactcagttgaagacacatttctttcacacattaccatttttaaaacccattaaggtctgattttccaaggcgctgaccctgacgcttctagagggcctcatcccggaagctggtggggagagcaggaaaatcttccccgttgagttttaaacgtccagacctttgttgtctccttgtgacccttgcaggagagctctcgtggcttctgtgcatgttcgtgtgtgactcgcccggctgagggactggcataaacaaacagggatgagyttgtaaaacactttgtaatcccttgaaaaggagaaaaatataaatgaaaatcactgtttaacagtgaaggcaggaagggagctgttcctcagtatagctgtgggttgtcgttacgtgagcaggagggaatttcactttggatggatttggattttctcttcatgctcatgctctctaaatcttgcaaaagcacatggtaaacacacagcgcatgtgtttctggaggaaacgcacagtgtccatatagagcaggcactgattttgcactgaaagaacgtggatgagaagttccacgtgtttaaataaactggcaacagcggtcccagatagcttagccgggcagcagtcagaggtgccctggcctggggactgagctaaggtctcagaagggtcagctagccaagctcttcaccggacaacccctgaattaaccagacacatcacagatgcagactgttgattccagggaacccaggtgaaaggccaaggagaggtgaggtagttggtgcggtgcccctcctggagtcccttcaggactatggcactacagttctatgtaagctgtcacccaggactcatcttcagtggagtctggactgcagtcgggaggtgacaaacatccatggcatgagggcagcaagagcccctctcttgggaaccagttgtggccactatctgcccagtgaacatgggcttcagccccgagcatgggagggctcctggttgggcatctccctgggagttccttggtactgcctcctgcagggtgaggaggggtggggcctacttccaggcctctggaagcagcatcggcatgtcctttctggtgtgaactccaaatatctgagatggtctcagttaatttagaaagtttattttgccaagattaaggacatgcrcctgtgacccagcctcaggaggtcctgatgacacgtgccccaggtggtcggggcaccgcttggttttatagattttagagagacatgatacatcaattaatatatgtaagaagtacattggttctgtccagaaaggcagggacaactcgaagcagggaaggggcttccaggtcacaggtaggtgagagtcaagtggttgcaccgagtttctgataagcctctccaaaggaggcaatcagagatgtctttctctctgtgagcagagggatgactgaatacaacgggaggcaggttggccctgagcagtttccagcttgactttcccctttagattagtaatttgggggccccaaggttctcctttcatgctgggaggagggtttttccacacgtctcagacccaactctcgggcttcttaacccaaaagaacttccacgcagaagacagcgaaaatagtgcacttcattttctaagacatctaaagctgccacaatgactgtgagttaggtgagctctatgaattaggctagggatttrcaaccacttagcaagttctaagtaactgtaaaagatcccatagactgcaaattgtgtttcatttggggacagataccctgtcttggggatttaagtgtgtttacctgcccagagttgacacagacgactgtcccttagcttcctttcctcatgctggttttaagtgcttcgaatcgggattttcctacccatctgatgcattccattgaaaattcaggaatacacatgtatgtgactgtttattggcaagtaattgtgaaataggccagaaatctaccagcttcctttaattaatgtaacaaatacttagcaaggacctcctgcattctagggattgtgggggtgggggggggagcaacaaacaaaacagataaaccctgccctgaggcgccccttgtcttgtctgggggtggaggtggggcaggcgtgagacagaagaaacaggtaaaatacagttcaaagtcaggtgctggtcagtgtcttggagaattctaaagcagggaggagggatggggtgagttttaaatgtggtgactgctgaagaaatggcctctgacagcctggaggaggagctggagctgggggggggacaggctggccagctcctccaacacacacacacacacacacacacacacacacacacacacacacacacacacacacacacacaccctctcccccaaggacccacaaggactgcggcctcttagcgtgtgtggagtcatcacactgacccttagcagtgtggcctgacttcatgaggcccccgttgtcatggagaygctgggaatgggaggatttgccaccctccagtgaggagcccccatcccatgagtgcaaagcctgaaccggcccttccctaattggcacctctatcctattttctttggctgaggaaattctcgtaaatgtatatttaatgtggtgttgagattggtagttctcccccatcccccaaagatcatcaaatctctgggggtctttcaaaacctaaaggtgatctccctggtcctattatgctgttttgtttttgcttcttttctttttcttgaaagacctaattgtggagttttttcccccttctatgaatcccaagtaaggaactaaaatggaagacgggcttctggctcccgctgcagcagatgggataattctacaggtgattgccctggaggtctgcaagggagggagagcggcaccattagactaacacagctctattattgactaatgacgaacagcgtcgccttgccttgccaccttaaaacagacacagggatttgctactctatttgttttataaaatatgcattgagagcaacaccaaaatgctgaatgacaggtgaccctcagagcacgcctggtatgcactgcgttagcttgccagtatttcttagagacttatttgattctaattcagtaggatttttaaccccaacattttgaaatcttgctttgaaagtccatgttattcccattaacgtcagtgagtttttcacatatctaaatatctaatatcatgctttgagaattgaagcccagcctgctctttaaaagcaagggagctcaccacatcctggagttctgcagtgatttgacatgtcctggaagaaattatcttcgcaagaaagtaagtttagttgattgaaatgaaattaacaccacatttctgtgtcataatgtattaacctgattggctagctggattccagcctgtttacaaacatcctgaagcctagatggccccttcctcagtgtccttaactgctgttctcgcccttagctcgcgtgcccaaccctaaggctgaaaacgccccctgtaggctactgtaagctgtagcattcaaggcctcccgggtgtcgctgtaatttcttgtatacattttagctccatctgtggcataggtaccattcaatgttatcttaatacactagctttggattttgtggctgcaacaataacaaaaaaaaatccttggttctgatgacttcatgttgtttcagaagatactcaaggccgggtgcagtggctcacacctgtaatcccaacactttgggaggccgaggcaggtggattacctaaggtcaggagttcgagaccagcctggccaacacagtgaaaccccatctctactaaaaatacaaaacttacctgggcatggtggtgcacacccgtagtctcagctactcggraggctgaggcaggagaattgcttgaacctgggaggcggaggttgcagtgagccaagatcrcaccactgcgctccagcctgggtggcagagcgagactccctgtgtggaaaaaaaaaaaaaagatactcagatgtagctgtctctgcctgggttgttttctaaatgcgtttggctggagatagaacagatcctgcctctatccacggcgtaagggagttagcttcatggcaagctctctggagaacacaggccattgtacctgctcatgagaacagaagtgaaagtcacacagcatgcatattagttccgaggctactggcattattatttaatgatgagttagtgcaaattgaggggtgaggaagtagcatgtacaaaggccctgaagatgaatgactgtgtgaaattttgaagagcagtttagcccgaaaatattccatgagtagctgccaggagrgcttttctggaacagtattaaactttagaaaaagtgttctgacatttatagactgacacgaaaacagaagtaaaagtctaaattgaaccaaagtcctccttaaagattgcctttgaaattgagtaatggcggatgcccagcacctgatgtttgggcacgggcgacaggacgtagggtggtcatccgaatatccctgccccactccccagctctctatggcattagtagatgctggaagatgaggccgtgttttctctttcatcacccgtgcagtgaaggatttgcgtggtctttggtgcttttcttctaaataatgaacaattatttcttgcgacattttggttttttactgccaattccaacagccatttgtcttttcagagctaagtttataacttcctcctttctctcctgtcacttttaccccattctgatttttcatctccctgccaattgtggtttcgtttctgagcactcatttattaatccttctttttcatttcccagaacacgtgctggtgtaaatctttttgcagttaaagtattacattaacctttttgatagcatggggtggtatctcggcggatgggcgagtgctgttcgcctgtggtctgtctcaggggttctagttggaaggcgtcctgcagccatttcttcagaggctaaggtgtgggggagcaccttggggaagaagaaaacatagtttctgcccttacaaagctgataccccatcaaacttgagattaaaacagacaaaaaacccaagaacctacagagcactgcagagaggccttgggaccctctgacagagtcagtggggagtcggctgggaagggcagcttttctgtcccagcagccttgcttcctcttcagcatgctgagggacatggagccctccaccattatctgaattgattccatctttctctcctgcctctgctgtgggtttccataatgtgaaattaatgcatgtgcttaggttgcggggggccaacccctcagaaatatgcaaagacttcaagggagaccttttcttttcacaaagaggaagatcccccacccccaacacacacacacacacacacacacacgcacacacatgcacagtttgcatagccggagtagggagtatctctttctggggaatgttcgtatgtcactgttgattttacattgtttttcctttctttgacttgaaaatttttaaagtaacacaaatttattattttaaaaacttcaactctggaagtacagccgtaaaatcctctttccagaagcaatcagtcttagtcctttggaatgcaaccttataaatctgtttctgttgtaaatatacttccctgttcttacctgcctttacctggagagtacatagtatattcttttgtgagtaggactttaacttcctaatatatcataggctttccgcagctggttctgtattatggattactgtaatttattaacttttcccactttgagtggaaatttagtttatttccaactttttttttttgcttttatggtgttatgaacatttgtgtatgtctgtatttctgtgctgtgtgcaagtatttctgtgggatagacgtctaggagaggaattgtttggccaaagggcatacacatttaaatgttcacggatgcagcccagacccccctcataaggctgtaccaactcatactctcagcagtaataaagacgcgtccatttctcacacctctgcagaggatttctaaaatggctttttatttttcaaaaagcttacatttgacaactattgatgttgtgcaactttctgtgtttattagccaattatatttttttctcctttgatttacttatacatattctttgcttttttcgattgtttcttttagtaactctgcagtatggctactagtcctttgtctaacaagttatacatattttattctagtctcttttcttagcagtttagtggtgtcttttagtcacgctggagttttaaagttttccgcaatttaatctgacgatcaatttactggagtttccagttttgagtcctgctttgaagcgccactgtaagatttcgaaaaaggactatcttgacttacggttttgttttaatatttttaatttactggtaatttgctttcgtgtgacctgagaatgatctgacataaggtttttctacatagatggttttgctacaccctttccataggcttcactgtcatctaccctcatcactgaaatgtccccttcatcttattctgacctttcctgtgtgtgggtctagatacaggctctgttctgtccattgctattcctgggccagctcttccctgatagtaatgtggctctgcagacagttccacgtgtagaggatgtgtcctttttcattcttgtttgtaaataagaatgggggtggggacacgggaggcagaatcataaacaaatagcctgacagaacagggataataaaaatttaaagaaaaagggggttaggggaagtagagtaagatcatgccctactgtataggtcataggtaggaatcaaaggaaactatttcaagctcacagaccaggaagtggaagattaggcaaggaaaaaaaggaattaaaatagggtgaccagtcatcccagctcgcctgtgactgaggggcctcccaggacacggaactttccgttttaacactgggaaaatcctgggtaaactgctgggacaagttggtcaccctagattacagacgctataaaagatatacacacaaaggtaccactagaataaaaacactttacaaaatattaacctaaaagaaaaagcaaagaagactaaagagacacagtaaccctcactgcaattccagcatcagccaacaggacaaagcggaagctgtgtcaggaactgtcagggggcttagctgcttctggaaatgaaatttcacgttggcttggtaaggcagcccgtagctcagcacatgtgagcagcacatgtgaaacacagtgattcacaagggaagggcaaagggatgggcggtgattaatcaggcaaatgaaaccatagggaagcaggggttgccatcttgggattagaccaagcagaaatcaggctaaaaaggcattataagagacagatgagaacaccttaaaatgctaaaagtcacactcataatgaagataaaacccatgtaacacagaaaccacctgtataaagcagaacctacagcatacgcaaagagaaataaatagcaacacggaaattgtcagagatgttaacacactattctcagtacaagacaggtcaagtggccacaagtaaggaatgatacaggagacccaaacaacctatcccgtcacagatacrtattgaaatgcattcgctgagtagaaaatacgtctgtttctcaacatacatggaatatttacaaaagcttatcaaaaattaggttatgaagaaaagtttcataaaagaattgttacaatcaacattctctgatcacagtgcaataaaactataaattgttaacaaaaacaaggcccatccacctagagacttaaaacctattcttgaatgaaagtgkaaatataaaccaacgtaatagaatgtctgtaaaataataactctgtgtatcaaaggcatagttaatgcagtgattagagaattcatgactgtagacacctatatcagtaaaaatgagggaagaaaaataaatggaattaataccaaactcagaaaactatgaaaaattaaaagggaagccaaaaaagtataggaaaggaaataatagaagcagaaaataacgaagtagagaaggaaaaagcatttatttaatcagtaaatcaaattctaggtcctttgaaaaaaatttaaacagacaaatcattagttattttattcaaggaaaaaaatggggaaacacaaatatataaaatgagaatgacaacagggaaataagtattgatacagaagtttttaaaaagcacaagagactaatttgcaaataaatatgaaaacatttttgaagtgcataattaggaaaaatccagttttagcaaaattaaccccagtagagatagaaagcttaaataaaccaatttacatggaagaaacagagaacattttcaaagaactacctcacaaaatgggtctgagcccagttgctttcacaggggaattctagtaaatcttttgtgtagatgattctaatgatacataaattgtttaaaagcataagaaatgaagggaaacgtcccatattttttatgcagcaagtacaaattgaaacctaaacctggtaaagatagtatattgtaaggaaaataaaaactaatataatatggaaatattgatgcagaaatcccaatgaatattagtgaatagattccgacacctcattagtagtataatatacctcaacaaatataacctttctatgcccaggaatgcaagggtagtttggtattaggaaatctgttcattgcattgcagatgaataatataatcatgcaaaaaggaaggaaaaaagtaccaatgcaagtaacttaaacactgtactctgatgacatgtactcaattgtagggggaaaactacaaatattcttcttaataactttgtttttcatagtgatgtggaattatttcatgtgtatgtggattgagaaaatgactaagtgtgttgatgtttgggagaaccccctgtgaagaagagggacacttacatggagtaggcrtcaaggaagaagttggtgcagttgacttggaatcagcatcatctatatggactcattatttctcaaacatgcacatatgtacacacttcttccagctctagctagaactaaaaaggcctagaggcagtaataccccagtcacaaagaacacacctagttcccagtcttattttcaaaataccatgcaccactgaaaaggatcttgtgcagcttggagaaatggctgattccaggatgggggcagcaaagacacaaaaggagcctagaacaagaagaatgataagcaggatgagaaggaagaatacaaaatgagcccagaattagcagggggaagagaagccaatttttaaaatgggcaaaacattggaacaggcacttcaccaaagaatgcatataaatggaagataagcatatgaaaatatgctcaacatcttcacccttagcaaatgaaaactaaaaccacaaggagattccactacatgcttattagaatggctaaagtgaactgacagtgccaagtgctgatgaagatgcagagcagccagagtccattgcgggggaaaatgctgaattacagccaccagggtgacagtcaggcaggtttaaaaaatagagttgaacatacacttaccatatggcacagaaatctgacttaaatgtttactcaagtgaacaaaaacagatacctactcacccacccatccactccttcagtcacccacccactccatcactctctctctcttcacccactcacccacccccccacctacccactcacccacctactcactcccccacccaccccccaactcacttacccccacacccgctcacccacccatcctctcccctctcccaactctctctctcccaactctctctctctctctaactcagaaaagtggctttactcagagtctccccaagccttaaacagccattccctcacttggagaactgagtaagtagataagctgtagttcatccstaccatgcagttcagatcagccctgagaaaggagcagacaattgatacatacaacatcatgaatgactctcaaggcattatgcatttgatagtggaagaagccagacactgagatgacattactccacttacaggactgactgtgggaggcaaaaccactgggacagcaaatcagtggtagcgagggatgggattgagggggaaagaggtttcctatraaggaccacaggaagtgcttaggatgatggaactctggcttgakcttagtgatggtcatgtgactgtaggtgtttgtcaaaacttacagaactaaacaccaacaagggtgagttttacttcatgtaaaaaatgttaatgtcatgaaagacaaaggctgtaaaactgttccagcttgagggagactgaagagacatggcgactgaatacaacgtgtgcctgtactccagggaaagtgtattgtgggagagacttaattgggacaattgatgaaattggctatggattatatgttagataaaagcactgtgttgatgtagaatttcctcagtttgacaactgtactgtattatggttacctaagagaatattcttaggaaataagatgtgtgatatacccaaagtaactctcaaatggttcacacaaacaaataataatgtttgtgtggggagggagggggagagaaagaaaaaacagtggcaagatggtaaaaacaggtgaatctaggtaaagaatatactggtgttctctgtattcttgtaacttttctgcaagtttaacgttatttgaaacaaattttaactatttcagtgttctagatcatatatctttttccatgcttttagaatgcatttgtcaactttcacgttttaaaaatccagttacagttttgattcagggtgcattcactatgtagattaatttgggatcacaatgaatttctgttaattttgagaaaatttatatttctgatattttcctatctaggaatatgctgttttttcacttattcagcacttcttttatgtctttccataaaattttatactatgagtcatagaactcatattttttgctaagtttagccatatatattttttaatgtttgttttataaatgagctcttttcacctcattgaaattactaatttattatttctgacatacagaaaagctgttgacttttgtacttggccattctgctaaattctcttattagttctaacatcaatttattctctttaactttctctaataatacctggaaataatgataattttgtttattccttcctaatatttttatctgttatttctttgtcttgtcatgcattgaccagaacctagacaacaatgctgagagtagtgatactgttgatggggtgtgcctacccaacagttgtagaagtttttgtttctaatgtttgctgcttatgaaacataagatggtaattaacaggtgattgctggaagttcttggcttggttcccacacctgaaaagcatttgtgatttactgaaaaccagtgcatgttgaaggcttcccagccttacataattgagattcactttgactgtcatattgccaaaaatggactcaaaccctgaagttgtatccataccatcttgagaatcagttgtttgaagcgtcacccattgtttctaaccatttttgttataaagataatacacwcagagagaagcgcctgcagtgaatctttgtgtaaccatcatgcagatcaggagacaaaccatggcggcccctcagaactctgccacgtgtttcttcccatcttttsctgctgctgctcccagaagtaaccctattccgacttttctgggttttcttggtaatcaatttctggtttttctttatagagttgttgcctaagtatgcacccttcaacacgatactgttgttttgcttgtactttttgttaactgtacatataataaattatgttatatatttctttattgcaggctcctttaatccagtgttatgtttgggagacgcacccatacaactgcatgtcaccgtagcttgttcatttccagtgtcgtgtagtgtcccttcatgtgaatttatcacagtttattagtatcttccactctgatggacatttggtagttggaattttcattactaatgatgcccctgcctgtggtcattcctgcctgcctcttgatgcacacaggcacgcatttctgctgggtatgtcctagttccagactcactggttatacggtatggatgtaattattgttagttttccagtgtgattaaacatcagattagcgcccattagcaatgtctgaggctgcctgttgctccactcgggtgcccgtttggtattaggagcttcttcagccattcttgtgtttgtgttcatgtatctcattgtggttttaattttcatttctataatgactaatgtggttgaatatgtttttgtatgattatttgccatttgtatttgctctttttaaagtatttgtacaggactttcacccattctcttattgtgttgccttatataggaattatttctatgttctagatatggatcctttgctggccatatatgttgaaagtatctccactctttggcttgcctttcattattttaattgtgtcttgctgaacagaaggttttaatgtcaaggtagtttttagtcaatcccctcatttatgattggtgcattttgtcaggtttaagaagtcttttctytcccataagaacgtgaagaaaacatattctcctatgttttatagaccataggttggcaaacttttttctgtaaaggactaaatagtaaacattttaagctttgtggaccacagatagtctctgctacatattcatcttaaaaaaaaaaaaagaataacctttagaagtataaaaaccattcttagatgctgggccagagtgggccaggctgtactttgcctgttcctgttctagaagtcacagttatttgctctcacctttacagttatgatttcagttgcagttggttttgttttttgttgtttgggtttacagcatgagacatgggacatctctaaatggatatttattcatgttgagaagtccatttattccccatgtctatgcagtgacccctttgtcacaagtgaaatgagtctgtttctcagttgtctattccattttattgtcctatttgcttattctcccaccataccgcactactttaattattgtagctttataacaaattttcaaatctaatagagaaagtacttcatttgttctttttacaactgtcttggttattcttggttaagacatttccattagtatataaatgaatcagtttgtcacatttcagtttcagagtaatttttaaaagaactttttctttttgaaatgtagagaaggtttttagaaaatctttttcttcttgaaattgtagagaaacatctctacaattttgagtcatcaaatctgtaaacatattatagtcctccatttgttgaggttgtcttaatctttcccaatcatgacttaaagcctttccctacagaagtcttgcatacattttgttggatttattattaggtagatgaatatttaaatatatataatctattgtaagtgttatgcatttattaattggcagtgcttccttaagtgtttgttggagcatgctgctgaaagcatcttggcttatacatttccatagaagatttaaaattataggacactaggtttcctgatatttttgtttttttaaaaatcaacttattttgttttactgcaatttttttttgttaagagacagagtctcactatgttgcccagactggcttcaaattcctggactcaaacaattctcccacctcagcctcctaaaaagctggaactatggatgcacaccactgtgcccacctctaatttcctttttttcctgatctttctggctggttgcttaccaattttactcacctttttaatgaccccacttctggttttactgctttttcttatttttttgtttgttttctgtttcatcagtttcctatatgagatcaacccacagacatacaattttatttgagcatttgtattgcttagaaagcatttataaaattttattaaattcttctcgacatttttctttcagcatggcattacactgcagattaataatttccaattaaaggttgggtggaagctcttcaattgcacagttaaaaagactttgaaatatggagatttctttttgtacttgccttgggatccacaaaaaacaaaacactaccagaacagtaatttgtgctcagaaattatatccactgtaaatttctgtgggaatagaaatctggagaagtaaatgaacagctgatgtttcttatgattcagttgttacttttcatcacaataactttactgaattttaagcatataattactgttttgccttgtaactttaggttgaatttatttttaaaaaatataaagtccgatttacaaagctatttaatgtttgataacaatagttgaaggaaattcttttgattcagaaaaattttaatatcaaacctgaaccataaaaattgcagtaaaacgttactacctctgctaagtcattgaagtgctttgtgatacagtatgtcaggatatccagcttcagtttctgactaaatttcatagaaatgattgtcattaggtccgtgagcatcaatgaagtacaccattgattacactctttaaataatgtgcaatagattcagattcacatattttatgcagagtacctgctagtaggtaatatagtaaccataggccttaacattttcataagtttttcagtttagccaactaatccttttttgcttcacacaatttcacaaccaccacttataacacatcttagcagattccacttcaggttgtaccgaaktagtactttctcatttttctgaaaatcttttctttggatttaaaaattttttctttgaaaatattcttgccatggccatagtttgccagctgttaatctagctttcaaaataagaaaccacaaagaagagaaaattgaaacatagacctagtagaagaaaggcaataatgaaaagcataaattaatgtaatgraaataaaaaaaatttttgagaaaatcaaagaaaccaatagcttatttcagttttgaagacatcaataaaaatgataaaactcaaactgagaaagagattacaaattacccaaattgatgtggtaagaggaaataagtacagatcctacagacattaaaagattatgaaggacatattataaacagttatgccagtaaatgtgacaacagacaaaatggacagaawcattgaaagacacaaactatcaaagctctctcaggaattcgtaacttagttgctgtggtgcctgtatgactgtacatgtcagtactcattgaactgtatgtatgaaaagatttaatttttctgtatgtgaaaattatctcaatttacttgactttaaaatattgtttaatgctgtcagtcatttgagctacacgtagatttaccatttttattcttttcatcctttctgtgtctgtagccttctttatgtgataatcctccttctgcctgaagaataccttttcagcagcagcaagctgaagccagccagctccgagagccagttctttaatttacgagaattttatgagctggctgtcaaacacacccattagtaaaattcgaattatataaatttacagttaaatacattatgtttggaaagagaacacacattcaaaactgattccttccaattattgtactaattgtgctgttatccataccttggaggccatttttatgatgctgtgatactccacatttagtgctgtcaccttggtagcttgaagtcagtcctggtaggaatatttacacagcagaaattagcaaatgctactaattagaagtttatttgattatctagaccagaggttggtaaactatggcctggggctggggctggacatctttttttttttggtaaataagtatttgtcaacacagccacactcatttgtttatgtcttgtctgtggctgctttcatagctcagtagcagtcaagtgggagcaactgagacttccggcccacaaaacacaatatatttactatctggccctttgagaaaatgtttgccaaccaaaatctagatttcaaaatgtgatggagaagatgttagtaaggtgcattcattttcagaygtcttgtgtgtaactgttacattttgaatagctccagaaatttagcccctcttccagtggttaaaagtatcatctcattcaacaaagaaatcgctcatgtcattgccgaasacgtgaagttctgacataacatcttcatcacctctgtctcgtcactttgcagcattcatgtagaactgtgtgttcaccagttgcaaccacagattggctatggacatgagtttggcaaatatcaacaaagtcatgctataagaatcagctggctatacagaatttacaacaaagagtattgtgtattgaattatttgtaaattgtatacttcacatcctttatatcagtagagtttattctttaagaaatgcacatctacatgaatacttgttttggaatgccagctaaacatttatcagtacaccattgcctttatttcatttcacagggaattgctggcaagttctggtttcagtttcttttttagaaaatgtcttaattgtatctgtatttttatatcatttgttataggggtctaggtttccagttattttattcagaatccagagatactgtgactttttcttcaggcttccatcattcttcttgagaagtcagctcttctttcaagtaatgtcttttctctaaattgagatctgactaggtgtggacaccttttatttatcttgctttgagatcacagggattcctgaatctatagctcaatgtctttcaacagtttcagaatgttctcatctcttacttcttcagaggttatttttgctccattcccttgaatttccttctttgaacccatttacgcatcggtacacttccctgtatcttctaaatctcttgttctccgttatttcccattattttatatccgtggggtccattgtgttgatttcttctgatcgctctaacagttcattagttttctttgctactgtgcctaatttggttttaaacccattcatagaatacattatttcaatgatttctcaattctagtattttcatttttttaaatagttggtgattctttcctgaatttgagatcttagcttttttcctgcttgaaggtagtaaagcatagttattttacattccaacacctggaatccctgtgatctattttttgtctttatttctgccatttttgttcatattgtcttatctcctcgtgggtctagttgttttttattttgtgccatattagtacattggagaaacagtgtgtagaaatgacgtattgccygggaggatgttttcttcctctagcagtgcttggggcaccggcagtgtgggatcagctcattctaatcctagggattaatacgatcagagcagggctgtggctcttttgaggtttgctctagtgacagctcacttttactcctacaaggtggccattcagattcttcccccaagttgagggtgctcaaaggaccctgcaagacactgtctgttgccccagggcagtcacctcgcaggaatggtgcttcatcccagggtaggggcagctcctgtgctgctgtttcctcctgtacgctggcccaaaattgtcgctgtctgctcttagaatatgacccactcctttcataaagctgagttcaaatcccacatcccaatttaaaaaaaaaaatcatgttataagcaacactaacaacaaatccacttttctctcagccctgcccacctccccatcttcctttctgagacatgcagcatttctctgcaacaagcaaaattttgtatgtgcaaacacaccctcccaccccaaactttattttagtctctrtgtcttggttaaggtgtcttcctcgcagtgcctgccaccttgcggtcgagcccagctggcaaatgaagctgagctccagttctgcctgatgcaccaccccatgccttggtcttctgctggaggctgggggaggtgagcactggccaaggaccagccctctggttctgtccacatcggcttgatgcccattcaggggttgcaagttctcctggtctggatctattagttgaagaaattgccacctcgtaatttcaaattagtgggaattaaaaatttaatgggatgtatgtattttttggatcatatgaaactatgttttatgtggtatttaatgtgagtttaaatatgcttactaaatatgacttttgttaatatctcagttgatgctcgtgcgaaaaaagtctgcctttctacctttctttcctacctttctgccaaacccagtccttttactaatattttaaagtattgatttgaagcagcagtgtggttgcttctgtctgggtttgaacaagtaactgaattttaattcctgagacctcttacatatagcaattgtcttggctgttgtaggaaggcagcaccctcattcctctgatttagctctctttgattctacaggaagttgttgccactgtctctttttattaaactaaatgccagaattctttcatgtcatcataagatgttaatgcatattgctttggggaccaaagtcatacaattagaaaccactcaaatgcttttttattctaattctgaggttaccaattccttaaaattagtaaattttcactgattttgcaagccagttgtaaaaaaaaaaaatagtataaactcctcactgacggtagtttggaagctgcattgtttggatgtgatgtttcagtgccacacacgttagcggtgggaactggaagccagtcacgaatcggctatctgcttcagggatctggctttgcactcctgcccctgcccctgaagtggctctagggacagctgtggtttgagtggactcttgctccttcctgacctcttaatggccacatggacccccttgcttatctttgagagcagggccttgatggaaatgcaaatgtgtttctctttggtaacccagataccaaaaccaagtgcagtcctggaaggtgaaaagagtttccaaaggaaaaataaaagacacatttctaggaagcatgggaaaaccttggtggctttgtcctctggtgacagcagcctgggggaggtggagtagctgggatgcccccagctttcgcctcccctgggctctatcctgcatgttcttggtccatagccctctgtgggccatatctttccagcatcagtacctgttggggtccgtgctaggaacacagcagtgagagatgaagatgtggcctccctgaccgcctggagtccacagtgcaggggaggagggtgactttcaacaactaatgaacaaagcgtggctcagtcgtagctgagagaggcactgcccaggagaagtatgaggcatcgtgggagcatttatcagagtcagaggaggcttctttgagaggtagcttttaaatgagatctgaaccacgtggaacaagtaagagctcacgagtgcctgtgaagaaggaccccaccttgcacttgggggacccgaggaggacctgtgtgcttgccgtgcaaagcagcaggacagaggacccagctgagggccaggcgggagcaagggcccagcacactgggaggtttgagagggtgtcaggaggccatttggatggagaagccacgggcaaccagaggagtttcgtctcgagtcctcaccctggctgtagtgtggtgagcacattggatttggagaggttaggcagatgcaggcaggccagttactggaccatcatggtggtctaggcagggaatgactgggtttagactagtagaaggatgacagcagtgacgtctgtaagtggacagattgccggaagagttaggagtkaaaacgaggactttgtgattaaatagggccaaagaggaggataaggcaggcgtgggcccgtgttgctggcatgtgtgactagcaggaggggagtccccatcagaaggggaaacagagcaggaagccaggagtggcgggarcaacgcttcaaccttgggcctgctcttgttgaggtccagggaaccagtgggtcggatccgtgagcatgcaggcatggagctcagagaagcagcatgtgtcagagatayggcctgagagccacacacccactgctgctgctgtgatctccttgggtgagagcatcagggagaagagagaaagacccagtaggtggtgtcgccaagggagcaggccgtggtgacagaggctggtggaaccatcgggaaaaagggtgccagagcccatttccctgtggcagccaccaccccctcctcacaacacccaccaggtcccttttccttaaatcaaaacctggtggatttcaggggcaggcgctgctcagttgtggcctctgcaaggtcccggccatgtgtcaccattgagtagctgctacctggcactgcgccgggctctcatgagcacatgtgagtgagggagggaaggggctccattggctgagcagggtgcaccctacctctcctgtaactcccaggagtggccgtcccacacccagatggggagtcggggtgaagccaccatcctgtgcgtgaatcaatggaaggcaaggctggactcacccccgcctttccccagggcattgggccrgatgttactgagcctccttcacttcctcttccctgtggccgccccccgaccttcatttccttggtaatgggacactttggccgctgtcatggttggccaggctcggtgtgggcggcacccaccagttccttctgtgaacatacaggttgatggcaacagcgctggggccatggggatgactgcggggagaagggctcatggcagagcaagcgcagtggaccctctccctctggccagtgttsttctgtgaagaggtgcatctctgcgtctctgcggcgtactctgcgagggtccctgtggaagtggctgagatcagcaagacgacgtgtttgcaggggttgggccacaccaggctctgcacgtgacatggagcctgcagctggaagaacagtctgtttaataaaaaataaccatttgataattataatcacttttaaattgataaatggattcttttaaataaaagaaaccattaagaatgattgttctgcagaaaaagcacatgaggaaatgaaattttctatctcattgggaatttcttggtaaatatgcaagcagatacatacattacatttagattttagaagtaaaatgacctcatatactttacttttttagcacagagaattctgtatagcataaagcagtaaatcacagatactgggcattatgagtgtatttttcttttggaaaaaaaaacattgaaaaagcagagttattaattggagtcctcaaggtccttatttcagtaaatctgaaatggtgaccatcttacccatagctaagttgggatgccaaagccatttccaccatcagcgtgctagtagtaaccatccaggggcaaagcggctgattctgcagcctgggcatgtggtatgtgggtgtctctgatgggccaagggaaatgacaggcccttgtgctgaagactgataggagttgatttacatgaaacacatgtgtttttttttttaaagacaattttaatgcacatattttcattttcagctttatagtgttttatgtcttttgcctttgtgatttaaattgtcttatattatttataagcattttctattatttataattatttttaatgattttatgtaataccattttatttctagcttgacctgagttggcctatgctaacacatttaagctttcctaattcccaaggttaccataaatcagcaggtccctaacttctgtattcatctctgccctgtagagaatagccaacctcaggttttcgcagccatgcctcatctctctgtttctctaaagggaagccatagcaggtgcctgggtaatgtccagatctgaaaaatcccatgtaacctggagttgagggcctgtctttcacccagtctgtttgtaagcagtgcctctgcccccaccatgtccccacctgacaggccagctcaacacctgcctgcctcctcgtccctgctctaacactagtcagggcgcacagcccagcgaagtgctctgtctgctgggaggaggtactggctgtgatcggactgccccccacaaagccctgagcaggtgaagggtgtgggccagccgggggcgaaggaacaggtcaccgaggccactgccagcaccaccaagaatcaggccaggttccgggggcatctctgtccccaccagcagcactgcccttcagctttttgatgaggccggttgttggccataagaggagcggtgataagtttagattgttttggtgtctgtaggtcattactggaattacaccagccagccatgaggtcataaagttaccttgacagattgtgaatgccgagtccacagtaactctggagggctgcctggcatcrtccttcatcattgtccagaaacgctcctctcgggaaggctgggcgtaaaactgaaaagaggaggctcaaggaaagaacgcctcggtggctccatgcaggaaacattatttctgatttcaagctggagagagaaaggactttggggcccctgttttggaggcctggagtgatragtactrtgtctccaagctcagaatgaagccaccagtggtggctgcctttgtttctgcactttcagttcctgcaggtgcaggagcttgccagggctgctgtcagggacacttttccaggccccrctgccctggctgggtttccttctctgagcaggaacaagtgcccgatgctgttgctggtgcagattggagggctgccagggctgggtgaytccctgccrcattttgccaagcttgtgtagctgcttctgcctcttggaggggctgtgttagaaagcatgcatcacctccagttacctcaggcagcaggaaagacttttaacctactaaacaagcgtcttccctgggaaaatacatcctttggttgagactgtaggagacacactgtaagttatttatcttgaaccctaaactgcatgtaaaaaatgtaaccaaaccctcagtgcctggggcgaaatccactccctaatgttttaatgacayaggatccactatgctacgtgtgcaccgggtgtagacttggtccagtgcatgtggtgctaagccataagggactgttaggaagagccgggcatggtggctcatgcctgtggtcccagcactttgggaggccgaggtgggtagatcacttgaagtcgggagttcgagaccagtcccggccaacatggcaaaaccctgtctctactaaaaatacaaaaactcgccgagcgtggtggtgcacacctgtaatcccagctactcgggaggctgaggtgggaggatcgcttgaacccaggaggcagaggttgcagtgagccaagatcatgccattgctctccagcctggatgacagactgagactccatctcaaaaaaaaaaaaaagaatcgtgatattcttgataggaagtaaatgttagtcataggattacaagattttattctaagctcttacaagcaagcagttcagattaatgtgttttcttagaaaacttgatttgattaaatttcatactttttatctattccccaaaatttatgcggtccttgtgtgcttgagggttctaggaacaaagtgattggggaaacaccggtcccctctgctgtgggaccctgcgggcttccagaactggcgtgaggtccgagtcgctgtgggaccctgcgggcttccacaactggcatgaggtctgagtcccggtgtttcacaatattacttgaccaaagagcgtttttttcacaaacacatgaggcagcccatgtgactccagggacccgcaaagcacagcttgagaaatgttggtatgtttcaatggaaatgtatgtaattaagaatattagtacaatatttattaaaagtttctgtcttgaatgaagtaataggatatcctttaggaagcctgatgtcgggacgtgctgtggggtatttttatgttaggtgttaacattcagcaaacaaatccaggctctacttttatcctttaatgaaagattttattttttattcagcattggtgcattgaggacttacagccatcttatcttacctcgatgccattgaaacaaaaaaattagtcatagaaaacaaacctaatgccttcctttgcaagttccagtcagaagtgtcgcatataccagacaacacatcatttttatagttatagagagaactcctatgtacttcatgggaatacaaaaatgtcacaaaattaaaaggaatttttccaraattactgtgactgaacagatcattccacgctccgttataccattctgatcctaatcccatagtttaagtgtagaggctggaaaatgtcttcgatttagaaaggaaagacaggcgagtgctgtacaatggtgcaattcagtggccaacgagcccagcagtcgcagaccccatacattcctctcgttcatatcctatcgatttgtgacagcgatcacatgctattgtagtacaaggaagaggtttttttaaccgactgtatgacttgtagacttttctgtgaattttcattaaggttggtgaattgtacaagctgaggaaagccaagacaagctagttaaaatctcctggcacacaggtcagcctgagttcagattttatttcgcgggcatgattttggggatcccgtgctagattgtagttgtgttgtaataaagccccctttccagcgctgcagtgggttgtggaaattgttgagaggagaaaccaccttctcctaggcatctgtatttggttacccgccagcactgagacatgcaggcatggaaaggcagactcaggaaggttcaggaattctaccgactttggagcatgctctcccccggatctgaaacactggcccccgtcttatccacccacmactccttaagacatccaggcgtggaagggaagattcaggaaggttcaggaattctaccgactttggagcatgctctcccctggatctgaaacactggcccccgccttctccgcctcccgctcctttaaccagtcgtcaggtatttcctcaggtacccgctctgggaagccttccctgaccctcctttgcccccgtggggacgtggctgctgcttcccccgtgtgcctgtggccccttgtgcccagcgccatcgccactccgtgagggtagatgtgggtgccggccgtgtctgatgcctccccacaggggccttgggcacgctgtgtggacgctgcctgtgcrtgcttcctgagcgaccccatcagtaaagcgtcgccaccatgcaatgctgctggcagtccttgtactgagacaatgtggtagctgccatcctgaatttccctctgaaactgctcccaccaccagtgctgcctgtgctgtggccctgctttgtgtcctgtggcctaacactggagcgccggctgctacctgtctgtctcctgtgctggacaggaagcaccatgcaggcrgcgttgtcgtccgatggtctccacctgtggccrtagcaccgggtgcgctgtggactgggacacttccatgtcactccacacgtgtgccccgctgtggcactgtaaatattcatttgagctggtaaggaaaatgacattttaaatgccatgatgatatatagtgtatttctcatgtgaatcacrttttccttagtatggctcagcagcacgccatgtttccgtcccatagagaccatgcttcctgtggggacgcccatggtcctggctacctctgctgaaagacggccaaggtgactcttcagctataagagagatcactcatcctggaaacttgtcagagcaggagaattccagaaggatcaatatttttaaaaaattctgttcctaaacttttgctctgcaaaaggtcttgtaaaaagagaacagagacaagtcagcccaggagaaaataccattgacctttgaacaacacagacttgaactctgtgggtccacttacatgtggatttttttcaaccaaatgtggatggaaatatagtgttcacaggatatgaaaaccgtgtatatggagggccagcttttcatatacacagaatctacagggctgattgtaggacttgtgtaggtgcagatttttgtatccatgaaatcctggaggcactcaccagcatataccgaggaacaactgtatttgcaaatcccatatctgacagaggagttgtattcagaacatgaaaccaactctctaaactcaaaaataagaaaataaacattccagctagaaattggacaaacaatctgaacagagacttcatccaagaggagatacgtaggaccataagcacaggaaacaatgtttattgttagccaacagagaaatgcaaatcagagcctcagtgaggttccacgcagagaccacacactcctacagccactcggagaccacgtggccacttcccagaaagttaagcatctgtttccacaggaaccggaagttgtacttctgctcttgtatcctaaagaaaggaaaacttatgtccacacaaaaactgtacacaagtgtccatgtcaactttatttgtagtgacccccaaattggaagcaattcagatgtccttccaaagatgaaagaaaaagcaaactgtggtctatccatacaatggaatacttatgaaaacagaataaaaagcagccaactattgatacacggtacaatttggatggatctaaagggcattaggtggagtaaaggaagctaatcctaaaagataggattttttttgtatgtaacactcttgaaatgacaagcagtgatggggaagagataagggttaacagagactggggacagatgacttcgtaggtgtagcctgacaggtgtctttgtgatgagacagttcagtatcctgtctggggttttgtgcatgtaaatctaaacacattataaaatttcattttaaaacataatttttaaaagtccattaaaaataaaaatacataagaatttaaaatgtttgtaaaaactggtgacatcaaataagataggtagtttagttagatgtattgtatcaatgccagcttcctggttttggtaacgcatgattatgtagaaagttaagctgaatgaaggtgcctgggaactgtcactaatatttttcttgtgaatcttcaatttcaaactataaagtttaaaaaaatttgtgccttttacataccagttttttgttgtttttgagacggagtttcactctgtcactcaggctggagtgcagtggcgcagtcttggctcattgcaaacttcatctcccgggttcaagcgattctcctgcctcagcctcccaagtagctgggattataggcgcacgccaccatgtccggctaattttcatatttttggtacagatggggtttcaccatgttggccaggctggcctcaaactcctgacctcaagtgatccaccagcctcggcctccctaagtgccgggattacaggcgtgagccaccacgcccagcccatacccatttttaaaaagagaaaatggacaagagagcagggaatggcgttggctttgctgctgtgagtcttggaaaacccatttccagtgcaagtgcctgcgtaggagtacgggggcagcattcttgtaatgaaagtgagccctaaagccaaaaggtgatattccccctgaaatttaggaaagaaaggaaactcttaggctggaaaaatgtggctgaacttgatactgttcatttgatggttctttgattagcctcattacctagtatttgaacaacataaaaaattggttaagaatagccaaagagaaaatgcccgggtgagtgctaggcgtccatacacatggcagcttttaacaacgtgcagccatgaaatatggaaaacttcctgacgttgatcacagttgaaacttcatactttcttaattcagcctcttattgacagtaatatattttaactcaagaatgtgttcattcagtgtatattgacttggcttgttgaaatgttcacagtacatgtgaacactgggtttcctgtcatgatgacttaagacaggaggacagcagtgagtgattcctgccagtcaaggaactttccctggaaccccacttgaatggtaataatctgctcctataattgctgtggaaaaggaaagccctctggagattttacatctaatcatttatttataaatctgtagatggcagtctgcagaagatgtgtcaggggtcaactttgtgctcaaaacagttgcctgatgtttacatttcacagtgtatttttttaacagtacctccagcccccatcatcacaaaaggaccctggcttgctggtagctgctccccactcatcccacagcccagacacttcattacagatgcctcggcagaggctggtcccctctgtatttgctgaaatatgcatgtttttccatctcattaattcagtctacatacaattaatttttgcctattaataaaccccttggtgttagcgacagctatctaaaccacttcacctagtgtggaatgagcaagtgtacttgcaaatttccatccctggtctgcattttttagtgttgtatttgtgggttggagagtttgggtgcataaatcaagcattgtgaagaaatataactgccgaagactctgggttcagactggctgatgggaagtttgaaatacgaattagttccacattaattggggatagagggagatgcaggggggccatcccagcaygtggtagtcagggagggtctctggctatgggaaaatttgtcagccttgtatgtgcgtgagaccaactttctttttccacaaatacaaatcctctccaaattggacacttctcaaaagatatcttttctgtgtgttttcaaatctcataatttcttaaacatctaataaagtctgtgaatacacgtaagtgattgtgtatgtggtaactacaccagccaacagcattgaaaggaaaaaggaagaaaacacaaaaatcagaatggagccttgaagttgagatgagcaccacctagctcatttagagacatccacaggaaaggaggttccccaagacttttgttatgctccaaagccctgagacagatccatgtcacaaggacacctttctcatggttcaacatcaccagccaggaggaaatgcagaattctgtataaatgttaggaattcttagatttctcacctggatttgtaaaaattgcagttcatggcgagagacatccgggagatccaaatgccatcctcctagaacttgctggaggaaccagattctttctaagcgattkgcatcttgatgtgatgctacagttctatgacaggcccgagtagctgatgaaattctacgtggganaagcttttgagtgcctgtcctggtaaacctgtgacagtggcatcacataaaggtttccagaatgttctgtgaggagattgagccaatgtcgttggtcagcttaattggaagcaggtgattgaaagtcagataaacatgcaagatttgctgatttttaaatatgccatatgtgtcaaatgtatgaattgtgatgatggacaagaacactttcgcagctttaatgggagcatgtaatgacttgaacaagactgcttagttttggttactgatgatcaagtacagaatcttgctggtgtctccaaaacttcctgcctggcctgggcagctgtcctggctccctctggccagttctctgccaggcagccagtgtgaatctggaaggggctagtcctgtcttcccctccctgtctagtgcctttaacgtctccgctgagcctgccacctcctggcctcctcgaccctccacctccccgagccgtggaggtgagtcctagaccttcttctgtgggctcctctccccggggccctttcggctcagccccacttctcttattcacccacttgtgttctctgtagctaaatgatacataacaggaactcgttaagtagcttgtgcagtgaatgagttaatcctaggtgttttcagaacagtgaatttcaggttcctgactccgctttgagctcattcaaagaaagtcatgtaaataagacctaatcattgcaagaagtctaatgaagaaaccattcattatctctggagatgggcaggtacacctcacagaaagtgaagtctgttgctgatgaatagtctgcatgcccacatcttcctctgggtttctaagtaattgaataagaaacgtttctatttatattcttatttatgtgcaactgtatttaattattccctagttttgaggattggccaataaaccttttcttcccttttgccattgattattcttaagtttaagacaatgcccagtggcagatgtgcttaaccgccatccttcatctagttcwtgtgactttttaatgtcaattataaagaaaattactcctttggcttcagaagtttatttaaatctcttctgagaaaattggcagctcttcggagttaatgtccagagyagcagaaacagaaactggagggcacagactggtggatatgtgaacagaagcactttttttaaacaaagttaaaaaaaaaatgttatgctattgctaataaattgagtcaggggaaagaaaaaaaaaagagatccctaaatcagcttccaagctgccattaagatgggcaagtaagataattccacataaataagaccagaggccttgtctctgtttttatttatgtatttattttattatttttttgagacagagtctcgctttgttgcccaggctggagtacagtggtgtgatctcctctcactgcaacctctgcctcccgggttcaagggattcccctaccttagcctcccaagtagctaggattacaggcgcccaccaccacatccgactaatttttgtatttttggtagaaatggggttttcgtcatgttggctgctctcaaactcctgacctcaagtgatccacccacctgggcctcccaaagtgctgggattatagacatgtgccaccgtgcccggcctgccagggctgtttttaaatgaggatttctccatttaaggaggtcacctgtcctggacggtatttcctaaatgcctggcataggtgacatcatgcgaacaagtgatggttcagaatacagaagtcatgagtttgaaggytgtgatagaggaaggccgggagagaagtgagaacagaacrtgcttgccctgggcctgcagctgttgccagcatcttctgtcagctgatctgggcagggcgtgggggttcttctcaggcctacctcctaagaacaaaaacatgactgaccacgagcctgtcctcaggatgcagcctccatccttggtgggcacagctgagagaggaagttctgagctgctttggggtagggctctgttgcamtcaccctcccatctccttagtcgctgcaaccctgtgtcgcaaatagtaggttctcagcaagtgtgctgaaccaaggggtaagaacaacgtttttatttttttatttaatttatttttattttttgtttttacatttattttttaatccatttggaatttttctttttgagatatatataatagggatgaacttttatttcatttttctagacaggtgtacagttaccttaggtacatatattgaattgttatgtctcaccaatgcaccacaacgtagcagtctctcatagcccgacgtatcacccaaagttctttgtctcacgaccaagaaagttaaggagcgccgacgccaagggtatcactggactgaaaatttaataagcaaaagaagaaagctctctggtgcacaggggggacccagaagagggttgctgtttttacagttgaatgcaaaggcttttataggaaactgatgagagctgggcatcttatttgcatacggtgcaaatctgtggtagctccaccccgtcctcctagtgcacacgtaggcccttagcttgagttactccatattgctttgtttcccttactgtgcatgtgtcaggggacaaaatttttcattgtgggcatgtctgggaaactcacatgtgtagccctttttttttttttttatactttaagttctagggtacatgtgcacaacgtgcaggtttgttacrtatgtatacatgtgccatgttggtgtgctgcacccattaactcatcacttacattaggtrtatctcctaatgctatccctcccccagccccccaccccacaacaggccctggtgtgtgatgttccccttcctgtgtccaagtgttctcattgttcagttcccacctatgagtgagaacacatggtgtttggttttctgtccttgcaatagtttgctgagaatgatggtttccagcttcatccatgtccctataaaagacatgaactcatcattttttatggctgcatagtattccatggtgtatatgtgccacattttcttaatccagtctatcatggatggacatttggcttggtctttgctattgtgaatagtgccacagtaaacatacgtgtgcatgtgcctttatagcagcatgatttataatccttggggtatatgtccagtaatgggttggctgggccaaatggtatttctagttctagatccttgaggaatcgccacactgacttccacaatggttgaactagtttacagtcccaccaacagtattaaagtgttcctatttctccacatcctctccagcacctgttgtttcctggctttttaatgatcgccattctaactggtgtgagatggtatctcattgtggttttgatttgcatttctctgatggccagtgatggtgagcattttttcatgtgtctgttggctgcgtaaatgtcttcttttgagaagtctctgttcatatccttcacccactttttgatggtgttgtttgatttttttcttgtaaatgtgtttaaattctttgtagatcctggatattagccctttgtcagatgggtagattgcaaaaattttctcccattctgtaggtcgcctgttccctctgatggtagtttattttgatgtgcagaagctctttagtttaaagacttcatgtctaaaacaccaaaagcaatggcaacaaaagccaaaattgacaaatggtatctaattaaactaaagaacaacgtttttattctgtatcatcaaggagggaacccagcacgcctctatccttttaagagacacggcaagcatcagacctgagggacatcatcatttccttgcagctcagaatgcacttaagtgtcatgtagtgggttttctgtttatgggtttgttttttttttagaaaatgtgttcttttctatcttttgtttgtttttgagacagggtctcgctgtgtcacccaggctggatggagtacagtggcaagatctcagctcactgcaacctcagcctcctgggtagctgagactacaggtgtgcaccaccacgcccagctaatttttgtattttttgtagagatggggwttagccactttgcccaggtttgtctcaaattcctggactcaagttgtccacctgccccagcctccaaagtgctgggattacaggtgtgtgccactgcgcccagcccaaccctgtcctttgtttcttacaatattcaacagtcagtcacttctagctttcactttgtcccataaaaatatttcattgaaaattgcaagccatggcagtttgcagtgtttctaagctgaggagttcagctccacacccaacagagctccagcttctggtttgattcttagagataggagtgacttttttcaatcatgtacatcataattaggaggaaggcattcagtcttgaacatggggacaaaaaagtgctggagatagtagcttgagagttgcaaatatttattttgattctgactttaattcttaaaaatgtttgtcaagaagacagtggtgtgatggagcaggtccttcggttaccacaagcacacaccctttctctgtagtcttatagcttgttttcttggtcgattgtgccagctcttataaaaatattatgctcccaggcaaagggccatttctgttggaattgttgagaagattcttggcttaactcttgatccaactctgatcagcttggccaagactagacttgacaagtttgctctgaattgcctcatgctgctgtgtggggtttcaaatcattggcttcccagtgctttctgggctagaccaacaaaacaatgcctgggaaaagagagatgataggccgtgataaaactaaaactgcgtaatactggaattaactgagttggccatgtagatggcaagatattaaaattgagtccttgtgtgccaaagtcgtaaactcattcagataggccctaggtctgtgaatgtttgttgttgaatcctaggctctgggtggaaccgaaagctgaaaaacatgaaattccccctctgtcctttggatcttattcagacagtcatttcctagctatttcaagttttgatcaaaacagacacgcagtagaagcccagtctaaaacatcggtagtttatatcacatatttacttccatgtgtcttaagtggttaagttgtagaattatgtcttttagagaatggatgaagaagtctaggagtacaataggcaagagaatatagcaaagtagttatattttgtcaattttaaagtaaattctgaatcattttaagtatattcagtaacacccgtttgcccccaccttccttcctttgaggttttcacttattcactcattaataattcatcagtctttgctgtttgtggcatgagtatgtacaaaaggcactgcggcgtccattgctgtgagtaatatagagatgtccaaaggtgtggctttacctgtggaaaccacaggaccatacccagagcatttggaggtgccatatgctgcttaagggtggcacatggaggggaggctgggctgcacgcatgctggtcctgaggtgaccctctggccgcaggagagctggaaaggtgccagccgtgggtgccatgcacttgtctgaggccaggatggggagaccacattccaggtacagggataagaggaggaaagtcccaggagtgggaaggcctgggggaaaaggggagaaggtcagggggaggcaagttggccagatcggctggagcttgggattcagccaggacagagcctgagccccaggccagactgcagggctgtgcccagcactggatgcagagtttggatctgattctgagtatgtggtgatgactcggggaggcttgtgagcaggatggtgacaaccaggcaggattttaggaaggtttgtctggttttggcaggttctctggatgtgactggagtgtgaagaggccagtttagaggctctggaggttgttcagaagtggcaacaaaagggaatggaaataagagatgttgcaaagcagaaaccaactgacatggagtgcgggagaacttgaaggcagcagtgggaactgggagctgttcccggcgtggggagaaggctgacgttgatgttgcctaaggagttagaggtgatgaccaggttccaggtggctgatctggataggcagctgcatggggcaggagccccagtgtggcacagctgtgtctgtcccctgccggtcctcagaaagtgacacctaacactgtcccagtccacacagagccttgtccagtagtcagggtgaggtgagtggaagcaagaagaggagctggcaacaggacttgggagaggcggagagcacagcaggcagctgggcccagacgtcagccccaggcagtgtcctgaagcagcgtgtgcacctgggcagtgcaggcatcgcgagtaagaagagggtgttagctcggataactggggctcctgagcagccttcaagaggacaggttccttggggctgtgggtttcaaataacatcatggaggagggagcagagaggcttgaaaataaacggcggtggccggggggagcacaaagaagccaggcctggcagtggcacaggtgtcaggggtttcatgaaggaggggcccgggagtgtgcctgccacatggacactggagcgaaggtgcaccctgaggcagcccacagtgaggaattcaaacgcagcttcctgggctggatcctgcagggcctgagttctctgttccaggggcatcttcatctgaggatttggggtgtccgtgccctctcctggttgaaagtgttagaagccacgttggagaggccaccactcaggtgctaaagttaaagctctagagtttggtgcctgccacttagctgcatggccttgggagttattcactcctctgcactttggttttctcgttaatcaaactggaatccagatactcacctcctaccttgttatgggaactagacgtgggcggtgcacgtgggggcaccgagcacagtgcccagcacccagtgggtgctcaggggatggcagctgccatgatttttgggactgaatgctttgataccacccaaatatatggtctgaggtggttgtaaatagaattagcagaggagatgatacagaytcagagttgaattagggtttgaagaagggcttaggtctggagcgttacaggtgggaggaccagcagagagtggtcaggaatcaggaatgacaggacacacctggggagcctgagcggcggcttccaggcagggaagaaaagctcggggcagtatgagtccagaccaggggcctatcaggcgccttctatgcagggtcaggtggtaaagaattatctcagccttagtgggctagaagatctctgtcatagctattcagctccgttgctttctgagtaaacaaatgggcgtggctgtgttccaatgaaactttatttacaaaaacagatggtgggccagtttggtatgtggaggcatgttgactatggacaccttgaaaatcccatgtggcaacagatatgagccaagtggtgacgtggaatgccccatcgttgagggatggggacgcaagggcagcraggaggtcctgtgggtccrggtgtggcgtrggcccagcgtggccatggcatctggggcctcagctgcagggttgcagtggaaggaaggggaaagaagctcagagtgcattctgagggtcaaactggcctgtaagtgacaaactgaggtcacttcacatgtacatggagggagacaggctgtctttggagcagtgtccatgcaagcctgcctggagggagctgccaccctcagctgcagccccagacctcgcggttgctctcatccgtcgttcccagtgtgggcagtgacgcagcaccacggtaagttctgtagagtggacgccactcgctggcaaagcccagcagggcaaggaataagtgtcactcagtctttatccagaaaaatccaccaatgtacttttagtgcagtattaacasatggtagaaaatggaattgcctagaggattttaatctctgatggattattcttgtacctgtacctgtctgatggtcgtgtaagtccatgttaacaaacctgggaccacaggaaaggagaactgatgcgaatacaaacaggtggaggatttccaggcgtcagtggggtctgggagacttttccaagaagtgttttcattgcagttaacatttttaaagatgaatatctcactattataaaggtcaatgccacttctgtaatattaatttgcaattgaaaggtattttcttttaagaagtcccctttttcaagtttctcaaactggaattttcttgagcatctaagaatcctttcctttcaaaagatccccaagttaccccggtctaagctaagaagggttcagcgttggccggaagcataactctagctctccaaggccttgggctgcggcagggtttgcatgtccaggcagtaggtggaggcttctcttggtcagtgtgtctgctcagggggaggcctggctggggaagcgggtagcagtttgggaccagagcttaaaagagaaggagagaccggtgcggtggctcaggcctataatcccagcactttgggaggatggggcaggtagatcacaaggtcgggagttcgagaccagactgaccaacatggtgaaaccccatctttactaaaratacaaaaattagcagggtgtggtggcgcacgcctataataccagctactcaggaggctgaggcaggagaatcacttgaacccgagaggtggaggttgcagtgagccgacatcatgcygctgcactgcagcgtgggcgacagagtgagattccatctaaaaagaaaaaaaaaaaagtgagactttgaaagtgatgacagtttccacagttcccatgggcaggtggctcagaatgaggtggcctgaggcccacagtctgtccttggggactgggtggcccccacgtccaggcagcagggagaggacktgctggctgccaagatggggtgggagaagcccagggcatcaagtgccacggaaataaagctggttgccttagttgaatggcgcctttgagttcccagaagctcttctcagcgggaggctccctgtctttcacctctgctcttctgaggtaccagttgaagggtttggggggtgaaatcaaggcatagggctcctggcaacactacccctggctccggggtttgcatgccggggcttcttccttgtcctggctgtcagagaacacctggaaataaatgctgcattgttttgctggaaaatcctgacaccacctcctgccttcccctgggagggctgagacctggcctaggcatggagcttacggtccacagacctgcctgcctgcagcatgacagcctcccagagggctgtattgatttttgaagaggaggaaaaaggcatacaaaattggacttgccagccttctttgagtagaaattggtgcttcctaaagggaatcttaattggctagcttcgaagctaaaatgttttctcccccttcccttctcagaactctccagcccccctgtttgttcttgtgagacttttccaagccccagttacttttctttcctgctttggaacataattggattcttcgctgggtagagttttgcttggaagacctgagggtgtagctgaaccaagtttgagcaccctggaaggaagacagaagatgccgggagaccagccagctcaaaggagaaagggagggggacagcatctgaactctggcctccagcatgatttcatcctttaaactgaaaaccctgagtttcagtgccagcgacgacacttgttgaaaaagtacaaatgttttctgcttcttgtaatctacttcttgcaaatattagtactctggaaaaaagatttattttaataatgtgagtttcagatttttttctgtagttaacgttgttttattactctatatccttgccagaaagcgtgttttaagagtttcaattcaaaattaaatatgacctcagtgttttaaaatacaattatattaactgtccatttaatagttgctgaggatttttttggccactgatggatagtcaagatacttgtctgagattaaatgcagtattctcaactctgctaaccagctaacttgttccagctgcagcaatcaacaggaaaaacaagggctttctatgaagtgagctggagaaagttgttcccggataaaattgcagtactattctataagctgtgcttttcttttaaaaactccactgtgtttcataatagggaactatctattatttatttagaactgtacaaaccaatttacaagacaggtaatttagtgacagaattatttattaatgagcccaagtatacaagttaatgggaccgagccccgtggaggtcaatcctcatataatccatgccttttggaaagaaaagtattgtcttcagaacatttagttatgattgttaaatttaaattacgatatattctcttgctaagacaaaaaataattttttctgaattgcatgatgacagagttagtctgtaagctgtgtggagatgaattgtgtcaattaggggtaggtacatcttagccctgttggtaccaaaartattatttctcattgcatgggctcacaggagaaagcaagcctgttctttaatagagacgacaaatcagaaaccgctgcctgcctgggagatggaacagtcgtgcaggcgaggagctcagagggcgggcgtggcttcccaagctctggcacagcctgcaggccttatcaggtgctctgcttctggggtactcggcactttgctcttccggtggatgggggaggggcgggctgttccatgtgacagcatgtgggcttgtcatgattcggggtgaccactggcttccatttcccaggagtggctttgtcctcgyggtcttacggtatgtttccagtagatgagaaggcatgcctacagacagggcctgctggtgtctgctgtgtgtcatggggggaggcaaggttttcctcactgggacctcttcactccccctttattaatgaccccctggctcctccccagaggcccagaagcctagaggagaaatgagggtacagcatagatgccttagtgtaacgagtggggctgctggaactcaacagactatttacagttacagcatgaaggtggtgcttgaaggatttgctgcttcgtttcatttttctcatttcatctcatcatgaagtcgattgcattatatcgggggtggggaatggaacagacacagaggagaacccaccaagttctgtgtcttcaaacctgcagcatttccaggttccgactgcagagtcctatcaaartaagcaaaattggaagtgatgcccatttcctgggctttcacaaactttgttattctgcagtctaccacaaaatctgaaaaggcagagaaatgtagctttcactgtttagaaaatctttgtgagtttttcttccccctagggaatggttttcagcacattattcattggaaaaatgaaatctgaaatgtaggtgtattttcagtgcacgtgctccggaggagcctcagcacccttgtgtcttgtctacccattcgctcagtgggcagggattgagcactgggaatgtgctgggtcggagccgagggctggaggcagagttgggaccagccccaggatggtgcctggctgtttgtcccagggctcactggaacagccctcctgggcagcccttggttggacttctttacgcagcccagtccacacctcacctgtgcattcgtcaagccattgagtgcagtgttgtggcctgaatcactccaggccttgctttggagggttgacagtaggggacacggcaggccgggggcattctgggacccaggtctcctgcctatgtggaatactgatgtgtgttgtgtggayaggtcactgatgtgtttaaatgtaaatctgaccttcctttaagagcaattgggcagcagtctgggagcttgagactstatgatgtggacacctagtatctctttctggaagcttctagtgtataatagaaagtaggttggttactcattcccattgtctttgaataatggggcagtgggcctggattgttgtcctgtggattggggaagagatcatagagatcatagaagtaaccttagagtaaaagaaagtaaatcaaaatgctattctatgtagaatatatgccatcaagggcagagcatgtgggcgtgtggacttgtcatgatgaggagtgaccactggcttccatttcaaagaggagagctggagtgcttctattccacggagatgccccagactaaggtctttggagtcaggctttcattccattcctgggtctgtcccttatgcgtttggtaagttgttattacataacctccggacctcagtttcctgttttagaaatagagataatggtacctcccccaagggtctttgggaggaataaatagaacagcttataatggaatgcctggcacatgttaggcactcagtaaatagcagctgtgcagtgttgtgcgagagcttacatcgagctgttttcccagagtgcattgatcctcaaccgtgttcatgtacccctgcccaaggtgccatattgtgtaatggagatgtgacgtcgaggcgccatgttgcctggaacttctggagtcagccaccttgcctgtggctgaccttggctgtgttcctgagagagtgaggatgtgaaattgcatgacacaaagtcggtcatcttgtgcccgtctcatctactctcactggtggttcagttcttctctgcccctaaattcttacatcccagagcaggttcttggttgagacacaggtgcttgcctcaggtttccttggaaaactccagtggcaccaagcggtcagtagcctgtagcggccacttgcactgttgtccccttttgtggacgtggacgttgactctccatgtctggtctgtgcaggaaagagtgagtcctctctttctcactccagagcctkcaggggtacccaccctcagccgggcagggcaagccaggacagaggctttgagggcatctgaggaggaaactgcaaggtgtgcagtttggcccagcagagaragaccagaatgcagagggtactcagggcaggcagttgctactctgggctgtgtgcgtcatagcgtttgcatgacagacaccagcggttgaccaratgccccatttgaagcccatgtccaggcatgcagtgttgatctctgtgtatagatcgacgtggcttcttctctagggytggggaagagaactgtttaataatgcacagttgcctagcctcaaagatcctttgagaaatagctactctgtgcaagttttcaacaatttgtttagactaatggaatgactctttaaaagtttatatctttacagatatacaagcactttatttctaagcaactaatttaagctgggaaagaagaacgtgccctcatgtgtgtgtaaaacgttagaaagcagctctgttcactgccgtggtggtggaaggcatgtgcaacacagacataaggctatttgaactctttatttgccacatttacaatattaataatagcgtttctagaagttgtcacatcaagtaaaagatcttcattccaggctgtctttaggggccaaattgagactggatgcatgcatttaataaattgtagtctcaygtagtcatttttgtaaataattagtttcagtgaaagaataagttagcatattgtatgcatctaatgttgcaaatgtacatacagcaaactttgctattaatcaacagtcargcaycgcaagtggggtctcatacataatgaattgtgcttaagcctcatgggcttcttgatagaaaaataaaagaaaacacaagtgcagtaagcttttgaataaaatttaactagattgctctgcatcctgtaattgttttggaatctttagggacctgatcattcatctatagttttggggtgtttttatcttcatctgtcaaatagtagagacttttaatgatatgttaaaatgttgataaaatacaattttccttttaatgatttgaacatttggaggggggaggtaaataggctttttaaggctttctgatctgccaagtatactatttgggttgtcttttaaaaatattttcattatttcctgtatttttaagaatcaattatttttaaaaagaaaaatatatatagtccttatggggaagagttgaaaatttacataaagtgttctctgtatttttggtgggtgttttaaaatactatggtaaatacctttgcagttttgtttaggatctgacattaatttgagccccagatattgagggcatagcgtgccagttaaaaatcggtatccagttttagcaagatacctacgaccacccagaaagtaacttggaacctaacttaattttaaatggcctctttctcctcttcacattattgacattagtacatgaacccgttggtggcctataataggatcataaacataggattcattttgggatggggttgaaggcataaaagcaaggagtgagatttatgtccacctttattatgaaccacacagtaaaagtgcagtaaagatctgctgacttgacagccagagctcctcacagccctcctgcaagcactcatggaacccggccttctccaggaagacctcctgtttacttctgcgctaggaatgggctgtgctcatcacttacttccctgtcttatatgatgtccttttgtacagaatgcatctttaaaataggccctacaactaaacacataacagtcaatcagtagactcacctgtgataagtgggaggccctcttgtaccagaaagtttaaaaaaaaaaatacattactcatacctgtcattgtttgttaygtaaacttaagcatatttttgatgttttgtgcgtgtttattcacttcttcctttcatagttgaacacatcttgttcttgaggttgcgttggaaatcagtagggtggcgcatgaatcactgagaacagcccacagtgtgtggtcagtgccatcgtcrtcatcgtcatcagcaacggcagctcaagaccagcaaggccgcggttgtgtctgtcatgagcccgttggcatgccgtttgttttttatctttgccacagttgcactgttgagatccatgtttcctattactaacatcagcacttttaattttccgtttctactcagtttcctaaaagaactatagaatattcaaataattgcatgcgctttgtcaaacgtacatggtcatagtgcccaaacagttgctggccaccacgcagagccacggagcagtcactgccatgttccttcgcagcctccttggggcctccatgaaacatcggggccaatggaaggcggaagtgctgtttctgatgttgacctgtgtgtttgaccctcaccttcccttcctgcgcagtcggctgtcaactccagaggaagggacagccctgagtcagtattctcaccactaaccgcatgcatttcagatcctcagtaaatgattgaatgaaattaagccactgcatttgtctgaaatatagagtcaaaaggttttattcagcctcctgtttaaaataaaatkatctttattaagagcaggtagcatagtttatttcttttcttcagtcttacccctgaaagaaaacatctgagctttagcaggaagttataattaaatgcaggacaaatccatcaaacacaagacactctgctagagatctctaaatgggacataattgtgcatttaccagtgatatttagcaagagtctccatgcagcrtggataatctttggctgaaggcatgttccttcctacatgagccccrgagtctgctgctctgcccttcagtcccgaagcctctcctggccctccacaccaggttctggaagccagaggaggtggggtgctcactagctgggyttggaaaatgttgctcatcacctgagcatctgaagtgctgtgtgtggygaggccactaaaagcttttcagatccccaccrgtttccstgcaacctccttcacagcctcatggaagccttgcgtccaagctcggcaccttgccagattccagaggaactcagaggagcacctgtctttggaacgaactctttccttgggtgaccctccagggtggtcaggtagcattcccagaccataagatgaaaacgtcgtccatggagagagagaggaggtgttcgggtcacaggagaggcagagggtacacagcactccccatctggagtgtcccacggtcagcccgatggtgcctcagatgtgagtaacttatgaaggactcttggccgattttcttaaatcaaacaggattcaagccaagtacatcgtgtgttaatgtctctggggagtagaattcattcagaaatggacatttagtgattctctactgccagtggaatcttaaggcacccaaaaatctgaatacccaaatctcccagctggctggtcaagttttagaatgttgagcactctaaactgggaagagcctggtagccgtggtaccaggaacactcactcttcctgcttgctgctttcctcatgctgagctgggctgagatcaagactcctggggcacttgcttcctctaccctttgtctgtggccaggtgggattcccacacagtcaaaggaagcccgtgtccaacaggggccatttcccttaaatttctctcatcacccccagctctgctgtgcctcaggtgggccgctgccactcttccttcacgttcttgataatatcagtgtcttgaaaggaagcttcttgcaggtagggaggacgcttttccctggaatagctgctgtgctcatatgagtttgtgctggaacattctaaccacctttctgtgccctggtttgggttgaagggaaggcgatttaaatcaaaataaatctgcaaggcagttcatcactgggacattgtttttccaagccggggaaggcgaatgggttagggcagcttcccacagacggcaactccgggagaatatcaccggggccttccagtctgccgcagccccgggagcttctacccagggcaggtcagtgttgtccggtttgattttaaggaacccctggcattgccaacagttgtgtttttcttaaagaaatccttgagccaggtccacatggctctagctttgctgtgttaaggtgcccgacgccctgttgtcacatgtacacacgcccagcaaagctgggctgcttcacccaccagccaccatcctctcgtgccaagtcaaagaaagtgaaagccaccagtgtcatgatatttgcctcgggattattctgtgggtgacacgtgatgtcctaggagaggcctaggggaggtgcgactctgatgggctctgagtgtttccccaccaatgctgggagagggtcttgtctcctgcwgggttcaagggatgggataggaaggggctgaggtgccaggcaaaagtcttgtctcctgcagggtttgagggatgggacaggaaggggctgaggtaccaggtgagggtcttgtctcctgcactggctcctgctggcatcatsagctggcatccgtggcagcccccggagctgcaggatttgggcttccgagcaaaggtgctcccccggcaaggatggggcggaccacagggccggcatttcagtggtgggtgagttgcagggcccctggggaagactgggacgtggcatttccatgagcgtgggctacggagcccgtaattgttagtgtttcagggtttgccagtggggaagcttgaggaactcccccgtgataagcgccgccgtgagagaggccatcaccccagctcttcttccagggccgagcgcggcagggaaggaggagagggcagggcaggagaataaatttcattttactgtagaaatggaaatttgtgtcatggctttaaaaatctggttttatgtgtgtgtttaatgccattcattttaaatgtagtatcataaatcattgcttcagaatcaaagctgtttaattacatttcacccatgaatagttatctaatgccaatagagaaagagttaaaaaggagaactacagagtaaatcagaggttgagatcttcagcacaagcataaaaaatcaatttaagatgaattttactactataaaaattcttcaaatatccytttaagagtgggaactgctaggaaagccagctcacatttcaattccctcagcagcatgagagaaggacgcccgcgtgggcagaggcttggtgtgcaccccgttttgctcaggggtgatgaaggaatcctaactctggagtctgagcagttgctgggggcacagaacctcccagctctcgtggtagaatgccccctctcccacagtgtaccctcgcttccctgagaaaccccatctgcggggtgtgatggccagccagaccccgctagtcctgaagactaaccctgaccttgaggtgcatgcctcgccaaccaatcccacatcccagtcttacccggggaccgtacaactcacccaccactgaaacggcagcccctgtgctccactccatcctcgcygggggggcacctttgcttcggagcccaaatcctgcagccccaggtgccaccacggacgccagctcatgacaccagcagaggtagtgcaggagacaagaccctcacccagcgcctcagccccttcctgtcccatccctcgaaccctgaaggagatgtcagctgagctcttgctgcaggaggtgccaggcccaggtggcttgatcaggggttttgtttcctcagttgaaggtcggggcacatgggccccatcacgcttgctcttcctgtctgggcagtggtggttgacagcagccagctctgcatcactcaggagggagccggggctaaccctcactgcacagggcttccacccctctgttcggccgccttccccrgrgatcaggacagcaaagtacattacatatttctccatcgttcttcttagatagcatcagtacactgtttattcgsttagcaaagagcagagcaagaattgaatgactgaaggtgtgtctctgaaattgaataatrtttaagccaagcagaagttctcctttccgtggccagacctcactaacggggaaggaaattgggcagtgaaaagacagcactcccatgccctaaggaaactctgagagaggccacttcgttgcctgctcggcaggcccattctctgcctgcagagtgagcccggcttcccccagggcctctttgtgacgggaccgacaagggtttccaggcagtggcttgggctgtggagacctcagcctgtgtattaagggtactgggctgaatgagggcactgtctgcgtgagttcccttgggcagggatctgggtaaggcggcagtttggagaagaccggggcatgttctgtctggccgcagtgtccacggggtcagcgtaatttagccggctctgctgggcttggttcacaggtccgactgctggtcacagttatccgtggctgtcggtcatcctagtgagcttccttctttttcccttcattctctggctccttccttaaaaccgtcaggatttgtgtgcttggaaacctctgaccaccctcctgctccaccrtgaaaaacagtgtatgggggcccctatgtgcatctcacccaaaaaggtccatttttagaaagacccgaggatctcggcagagacttttacacccacaaaatgctccagcccagagacccagcctccagcacaggacagcgtgtgagactggcccgaggtcttccrtcgccgcccctgctgtcggatgacatgcacatttctgcamctgcaggacctcaaagcgaagtaaccctggacacacccttcactgggtctctttcccccacatctcccccaacaatggaaggcaagcaccgctccacacgaaaataacaacacgggtgcagttctgtgcctctccttagcttctccctgccgccccgtgggcttggtcatggtgtcaccacgcactgtagatgtcgcagacgcaggcccatggccgtgtgtgcccctgggcatgtctgctgtcttctggggaaatggaaacgccaccataggcatttactcaggcagaagctccagaactttagatcccagctttgccgtttttaattgtctcttgttaaaatgtgagtatcccagatggaatgcaaaagaggttcgtgctgctgaggccctggtttcttttctgaatggatgtgccagggtatttccgcccacagtacactttaagccaaagtaatttgtatcatctttaacacaaacccaaaacacgaaaggctgtgtttgtttaactagacgtgtaagctatagttatctttatttccgctttaactgcataagagaggaaacctttttaactataaggaaggtgttcggcttccttttatctcttgcctcattatgtacttttgactttattcagatttgtacaagcttggtttttacctcacaggaaaagcgagaactaatcgctccagagatcatctgagctctttgtgtgaaggtgttttaagaagttgtgactacatcttcttttctaaaacagcctccaattctgtgatacaaagtgaaatgccagttgtttgcagctccggggctgtggtcctcctggacaccagcggtagcaacaggccccatccacacagggctggggagacaggtccccttctgcacggggcccaggagacaggccctcattcatacaaggccagggagaccagcagaatcagcacggggccagggcaacagccccatccacacagggccgggcagacaggctgaatccgcacagagctggggttggagctgagagtcatccctgaccccagcttcatggtcctccagctcttccctgcaccattgccatgttcttactgctgcagccctgcgtcagggcagctgcggtgccttctgcctcttgccaggggcccccagcccccaccagtcacactgtgggccgcactcataggacaaagtgcccttcccgccctgacacgcacagtccttgcccacctttctgtgagtctcagtccccgaggcctccactctgcgtctacgttcacactgtctgtcctacgtccgggatggctctgttgcctcctctccatggactggccgtgcatcccttgtgtggacagagttgggacggtgctcccggctgcatcggccgcctgtgctgggccacatgtccaggcaagtgaagccttcactgggaccctcccagagcagcatgggtgtgtcgaggagaaacattctgtagatctcagcgcacgccccccaaggcagcccaggaaggaagggtgaagggcccgcgggagctgtgcgtccacagcatccacagtgcagtgacgtttcccaccttttcacagaagcctgaggagcagcactgtctgcagaaggaaactagaaaacttccgtgctccaagcctgggaagtcccggggaagcatgccgtttgtctggggcctcgagaggcagggaaggaaggaagggagtcacctgaagaaatcggacccagggccagggcttcccacgggggtccacagcacttgaaatcacaacgggatgtgtcatgcactccacagccccaggtggcagcgggagacctccccttcagggccatgtcctcagtccgtggaacacagccccagaaaatccacccctgctggagatggggaatcctttccatgagggcccaccaggtcgaagccacagatgaatgaacaccccaaacagaagcagccacaaaacagtctgaagcgactcccagaggtacaggttcaaactgcaggaaatcaaagggaggagagtgtccagaaagaaccaagagggccgcgcagtagctcacacctttaatcccagcagtttggggggcccacgcgggcggatcacctgaggtcaggagttcgagaccagcctggccaacgtgatgaagccaacatggagaaaccccatctctactaaagatacaaaaagttagctggccrtggtggcagtcgcctgtaatcccagctactagggaagatgaggcagaagaatcacttgaacccgggatatggaggttgcagtgagccaagatcgagccattgtactccagccacggcaacaagagcaaaactccgtctcaaaacaaacaaacaaacaccaggaaggtttgagaaagaaccaagtagacacaggcacacgaggcacagggctgcccccgagaggacagactcaccgatgaaggaaacacagagtaggccctctggagcgtgggaatcaggggactgcaggtaaaccctgaggaatcccctgaacacagcacacggccatggaggaggcagaacgcgtggatgtggccttgcgttgttggactcggggtggggtgggccgtgtggtgcagtctaatgactgtgtcgatatttctgggaactgttttcaatagtgagtgcttgatgatttaggtgcagccgtgccatctgtaagtcttacaaagggacactgtcacttgggttgccttgcgctgtgatgcagactctcagaacacacgtcctgggaggcctgaaggtggagagtggttgcggggcctcggtgcgtccttgcctcaccagtccccctttctgctgcacagctagttgagacgtgtgtgcccatgaagcagccacaggtgtttgcccgtttagatgcagtaggtgtttgcttttccgatgtgtggaggcagggcccagaggtttactaagcccctgttctcacttttgcagtgccgtggaggtcccagcccccgctgcggttctyggaggtccggagyccctgatgcagtgcacagcctgsctgaatgcctatttccaccagcccgaggctatcgaagagttccccgtgccggctyttcaccatcccgttttccagcaaggtcggtaactaagccatctgcrgtgtttcctttggggagcttgacttattaacgatcgctgacatcacagttcattttattgagtataccaacttggtatttttayatcagctaaacagaggcagcgtttggccgagctggagggacgggggttcgccgcctccacccactccaacacttgtgttagttttggcacagggtygcataattcttggcaaaggcaataaaaatgaagcatrcagatcgactcttgactctcgctggctgaaaggtttaaataggaacacatctgaatggcagtaaatttttcaataagcttattgtgaacttcaactatctgcttgccaacagcacagaaaacgagacttgtgcgtggacatttagctatttccatacactctgttggtgacacttacatcatagcaggtagcagcattggagcttctcaaataattttacatttaatttctcaaacgtaccagagttagacatattctttcttaagagatgacttgagaacttacctgtatgtagcctgcttaaggcttgtgataatctaaaacatttcccagacatttcttttaaagcttgtgtttggctctgctcaatacagaaattaattacagcaactaaaatcattccagacacatgccagaaatttattttgcatagtgagtttttcataatcatttttgtgtataaatgaacatatattcatatatgatgtatatatggagttgtacacttatatatccttaaagggaaaaattaccttgagattttagatgtggtgaatttaaagcaattttgaatttcagatcagatttgctgggtaagcttaacagtattctaattgctgcggtgcttctcagcacaaaacaaacttgaaaatggagagaacttttcaagggaagcaggtaaagaaacccctgaaggttgggctaatacctgagttcactaaccaagtcagacaggcgaacatatgaagtcatgagcacgttttgtgcataatgaactgaagctgtgcagctataatgaaccaggcaccttgctgtcctctgaatcatacagaactgtctccagaagggttcagtggggatctctaggatgggcagataggaagctagagtgggtgggcctttacatggaaccacaaacgtccaagaaacctctcatcatctctgcccaccaatgggcygctgccaggacaaaggcactaccaaagcctcctgggctgccgccagctgggggccacctctccccagygccacaagccagtgagccaattagacggtgtgggggaccttgctcactgtgcacctgatgggccgggcacagggcaggatgttgctgaatggcccaaggaagtcagagattggttttgtttattaaagttggggcttggggatcttagagtggtgaactcttctctatacgatctctttttgggggttcgcctgccaggaggagcaaggctgaagagctgtccagaggcttttcttctccttaagcctgtgaaatatgtgagctgaaatgtaaggtctcaggacagaaaagttctcttacaaaaccagggcaggaggtatctgcataatcatatggaggctgggagaatgagcctgcaaacccctgaagtttacctaaggtttgttgggcaacttcatgaaaaacataggggcaaaagttccatgaaaatcgttagttttctccaagtcatatggtggccctggccatggagctagaccctgctggcctggtctcaccagggtccagagagtggtgtgctctcaggcaggccaggaagaaccggaggaggaggcctccgcagctgctgacaggagctccagggcaggagtggccagcaaggaaggtggcaccggaaataatcagacactctccaaaccacccctgcaagcactgaacccccgctgagccttttccccctcacttctgcccatggcagtgtttgctgctcctagagccgaggacaggcgggcccctggggcttctcagtcaagtccctagtgcttaagcagagttgggattggccacacctacccctgcctccctggctttcagcccacgccaggccaggctgcttcctgggctggcaggtcatgataggtcttggtgaccaggaagacctcagagtagccgccaggatactggtaaaggctgtctggctcccccgtggccctgcccctcttggaaagccctacagtgcgggtggatacctctagctgggacgaggtccactccagccaagttttgggatggtagtgcgacagccgctcacatccttctctcttggtgttctagaactctgaggctggctgcagacccagggtgctgagckcagggccttctctcgagggtaggggctggagtcccctgggccaggcctgcctgcggatggttagtggttgctgtgggggctgggattccccaccacagcatgtgtaagccaggtttttaacatttagctcaatcgtttactcctgggcaggggccaggtgtatggattttactgtttgaagaaggggaggtggatggtggatggttgctaacaggragttaattggttctcccagatgtggatacgcccctctctgtctggcatgagtttggtttgctctctgtccaggttgttatcttgtaacatcagtgaaatcaacagtgaggggscaggtcttctagaggaaaagtcttttgacatctcagagccgcctggaagctgtggagtaacagaaatcaacctgctttgcagactgagaggagcgggtccattgtaacatggaatgaacatttccttgaccaattccttyttctgcacattttaatttctgtatatgtttaacatacttttgcatatcatttttcaccatagtctcacttctgagattgagaccaggtttatctatttcaacctggtttgtctatgtcaacatttttaaaaatgtgattgtatttgagctcatccttgagttccagcacattgaccatttctttctgaaggcctggctggtaaaacttctgactgcscagtaccaagccctcatcccttcctcaggcctgtcctgctgctgaaagaccctctctcctgcacacggcctcttcgcggtaccacctcaccttccaggattcctctctggaacgaacatgctgtttgtgatttgytttttaaggctaaccacaaaaatatgcattacgttgaaccatatgaaattgctattttttaggttaaaacttatcaaataccagaaatttcagatggttcaacttcttatcttggggaatttccaaagacagrttagtagctaggtagctgttgaagtatttctgccaagggacagtgaagctgcctttcccgaccaggtgtccggaggtccccggggctgcctcattgtgaggttgggacaggtgggatttcccagtgggagggcgctgaggctctggaaggaagcctcattgttctgctgaagggattaagaggaaagstgagctgtccagtgaagcatattctaatttctcgttcaagtgttgttttagtcaggtcatttcctaaaataaaattagtcaaagttttcttggtttggggttttttggcttttttggtttgctattctggtttttttaaagtgtcaacaaaatccattttctagctactgtgtgaccgagggctagcatcttgtcgtacaacgtagctttttaaggaggtaattttttcccataagcctctcgcaagggtcagctttgtatttatttctaattcatttttcctcaagaaatacttatttaatgaagccattatttttgaaatacatttttacttttttcttttataatgaaatatcatttaaactttgaacactccctgatttcttagtgtttatttatgaaaatgtttagcttctttatataatgtgccttctggagaagctgtaggggtcagcagccaatgcagctacaagaaatcctttctaccctagtttgccaaaagcagctttttacaatgagttcaagaaaagcagacctacggaaagcgaggatggactttcagatacagaacccatctgggcacgtcctcaggtccctgagccctcccacccatggaaaccctgccagcaggtatggctgaccccaggctgctgagggaggtcctgccaaggcaggaccaggccttggggctgcccacgcgagactgtggggagcctagctgggaccccagccttctcacagttgaaggtgttcaacggacgagttctgagttttctttgtaaagtgactgcaatgttcccttttaaatgaaatatttaacactttaataattccttcgtcacagctattggcttacagctatgaaatccagttgcatgacagcagtaaaatctcccttttttaacacctgctggtagaagtaagtttttgtaacttctattatagagcctcagaaaggattcatatttttgtatttttgtgtctccatcgaattcctcatttcaaaagcgcctctaacaaaagccctgccccagagttaagggaaagggccttcagggtgaattcgttaaggttcccaccgtgtcctggaagatgggccctctttgctggtgcttctagtgaggactgcttgggtcctggaaggggcatgtcccgggagaggatgacgagggaggagaggagaagagagtggcgtcattacttgggtcctcaccggagccagccctttaagattagaaatccttcttgaagagccaagcaaaggctyatccagccccctacaaccccatcctgctgcctactcacatccaggaaagagcccacccctgatgggtgcccaagtagatggcctcccctggaaagaggcatattagccctcctcacccgagggtcctagggcccgtttgggtgttcttaaaatgtgccytataagtcgtgatccagcctgagtttttctacagagacactgcagccaagaggggatgtttttctygtagcttccacatagatcacggcagcacgcaggctttgtcctttcagcactttgtaccgatattttccctgaacttaagaaaaaaattaccaattgaaagagaagagaatagctaaaataggagatgcatttgccaccacgtgtgggtggccaccgctgttccccttgattttaaacgagggctcataaatattgttgaccttgctgagatattacctggtggagctggaaggtttgtaaaccttcttccgatgcccgtttattgattagaacaagctaacaacactgcacttaagtggaaaaaacagctggtaaaaatgtaattctttcagccttagrgctgctgtgctccttttctggagagcaaatgtggaaatcaagatctgtggccttctggaaccttcaccaggaaaggtgaaaagaagaagaacccatccacagctgagagtggatggcaggcccgcgggtttccargtggccagtaggattgtccgatgtctggaatgagtaccggggccgccaccaggaacacttgtcatttctaccatggagaggaaagcccagtgcatttctgtggttcagaaacttgacacaaagagaaaagctggaatgtttaaaagcaaaaatagggcagagatcagtgaaagtgcaggatgtgtgtgaaacaagggtagagtgagcactggtggggatggaggtggtgaggggtcttctgagctggggacgtttacttacaccagccctgcctcccaagaacccatcccctgtgggtccagaagaccagatccccgccaatgtccttccctttcagagctgtctggaggagcatgccactagttcccagggtctcatctgccggcacacggcctgactttcatgggaagtccccattgatgctgttcccttcccagtgagtgggctcccgtcacccgtcctggctcatttgaatacctgcatcacctccagcccctcagcagaacaagaatgtcagataatccagaatgctgttgagagctgctccaggttgggggctcgcagccccagcatccaaaagcctggtttcagcagggcatgcccgcagagcccctaggcgccccgagctctcctggtttgcccgggctttgcctgcacgggctggccccgtggactgcctggccaggccagcccagtaacagcgaagcacaccactctcagctcctgagcttggctgaccagctatactctggcatattggtgaatttcatgggccaaagaacctraggttcagattgtgtcttagttcattgtttcatatttgaatatgcagtttcctacctagcaattgtcatgagtactttcttgctgtttatactatgaacaacatcttgggctaggagagagtttttaaagtttcaacaatgattcattcaagcactttcctttttcaagttactcatatctcagttcattcaatggggttgggggatttatatcagaatcctctagacatttcatttataatattctacctataaatttttatacttcttacccctcctcaagatacactaaaaccttagcatgggcacacgcacacacataccctgtttctgagaattattgttctaaaggaatttatcaaaatggatgtagctcytatgaatgcttttgctgtgtgctttaccctctactaagcctaacattcctaatttaatagctatttttgtttgagacttaaaaactgtgcgcattgaaggaatgttttgccgttgaggaaatgccagcccctctcctaggaaaggggtgctcggctcctggtccactggcagtggctggaacagaaccacagcctgctgaatcccaggaaattcatgrtgtccctgtgcagagccctctgactaatcagcgatcccacaatgcctgtagcagaagcatagttaggtgagagttttatcctgaatgtaagaggtggccaggtccttagttccctgaggttccgtgagtcgggggtaaaggaagcagccctcacacagagtaatttaccaagcctgagagggaaccaagaggactgtttgagagtcagccacttccaaaccttggtggacataacgagggtctctactacaataagcaggacttgtaatatgtaaaattattatgagtgctgcttttatgggaaaatattcacattaaaatataatttaactctggtgaagtaattaaacagtaaatcagtgatggcttctattaaaaattaagtcatcgtaattatgtgaatgcctttagaaggattttccgcagtgtcctggcgttggccttgagtggacttctcaaaaagtagaagtaaccaggtttctgcctgtgaggaaatgtaaattgcatcattgcttcctttaataaattttcattttaaatgggctttgaaaaataggaattttctctctgttttaaagtaaaaaacacacttttcacttaaatatgtttctaaatttctatttccactgtagtcattagctggacatgtgccgctccaaaagagaatgttaaccttcgtctcgtttgtcgtcataaatgcacattcatgttttacaggtaatgttcgtgcatttgaaataattccagcaataataagtagaattatctccactacctgtgtttatagagaaaatgatgttttaataacgtgtgcatagaattggactatgttatcaatacgttaaatgtgtaaatattagtataaaattaatagtgataatgctgaaaaactattgcaggagctgaaagtgtaagaactatgacttaatgtaaatgctttcacacatacggtttttgcctgcaatccttatgttcaggctgactcggaatataagattcatgagtctctgtccctctttatatgttgtttcatgtgtcagaatggaaaaagcaaatatttacgtagagggaactcctccctcctgttggaggtacgcggcggtcagtgtagcttcygaggccgcgtggagatgggaacatcctcaagacagagcagacttcctggaggctcagccggaacgtctccagctctgtagcacgttttaattccatacaagaagttactcccaaagaagtaaaytgaagaacgaaatcgaggaaaagaaagtccttttttgaaagctcttaaacacttgactccgtttagttcggatcaggcyttctctgcccttccaaagattcaggttaggtattggtaacgcccaggaagcacccactctggygagcycaccctctccgccagtaaatatatacagtgtagctgttactatgacaacgacttttttttcttgagtactgtttttaattgttgcacaaacacatattgtgtaagaaaggggaattgtccatagtcttccacgtgtggatgtgtgtgcccacactgtctgctttctttaaaaatgcacattcctttctggattgggctccgcgatcccccgcctgccaagcaacctgattttctcttcagcctttcctcacttagatggttttagtaagacctagcaaccgagctcaagagacacgtcaggacttactgcttgcccaagacatrtacttttcatagaaaattcgcgtctcttcctcttttcagaataaaatatgcaagaaccaacagaaatggcacattcccctgcttttccccaagaattgggcctttgatgttcaagagcagctgatattaaaggctatccctagaaggctgtagaaactgtacctatttatgacaaatgtaaaacagcacaaatctagctgaatgtgatggtatcattagtttgtgaatcgcatccttgaaaataactgtgaaggagccaaatcggtttaaaagaagataacaaaatggtttaagctacttaggttgaatgccaattatattttaatattcaactgagcatattttactaagaaaaaaggccgcattgacgcatgcataactcattggcagcgtcggccagctgtgccgctccactctccgaatcactttgtgcattttagtagcatggtaatttagtagaggactacctgagtgatggcattttcaatgagcaggtaatctacagagaatttttatatggttatgagttctgtgcttcagcccggcaacacaaaaatacatcaagaccaattacggtatcaactttcagtgtgatacccttgccacgcaagtgcatgtatttctgccccaggcatttcaaattgcatctaatttgaaatctttggggttttaattaaatttcagaatatatggaattcttcattagtacctgctctgaatagcagatcatccttctcccagtctctcgttaaagaagtaggctgtggtaaatagcgtgttcagtagctgatcatttgtgggacctgggtattggaacagaaatagtgaaatgcaaaataatatcaaaaagattattagtccagggagagtctcttgatttgtattttaatggaattttacatttctcttaatgatttgcaaattgtcctctgattataagatgcattaagcttttcattttaatggcaaagacacagccattagcagaatttttttttctgtcttctttttagagtgcttccctgcagcagataaatattgaaaccattaacaccttttgatgtatggtacagtctgcatcttagacccacacatggctggccggctgtggtccctccgtgccgcacacctggccggggaccctgactcttctctgaggacagtgagcagcagtaatgcctgtttccttttctggaaaacaggattctttttgaaaatttcatcagaaggtggtgtttatttgtattaaagcaatgcatttaaatattattcatggcccaatgtgtatttaaaaagctggtcttaccagtgttagggttgacggtgcccacagctcctgccttgctctggtctgcggggctggccttggtgattttggaaatggaatctggccttgcccccaggatgtttctctgtcaacccatgtgctgtgagagacacacagagctctttctgtgttagccagctgaccacagcacgaccccaacgtggggacacttgactttggtttggcctctgagataatgtcttggttttaaggccaggacttctaatgccctagaagatgaatatgatttacacgaccagagctacaaggcaaagctcatctcttctgcttcatctgctgaatgtgcacagggagctttaggcttcgacctggcatgcagtgacagtctgtgaaggcagtggcgcttcgggctaggtgtctccttgtgtcggagacctgtggaatccagcagctccgtctgatcgtatagttaggaaaaccaaggggactagagaatggcactgctgagtgcgggcagtggtggctgccccccacccccaccctgggcaagtgaggtcaggcctggccctgcttgccctccatttcgaagggcaattcttcactccaggcttgcacagctgacccgagagtgagtgtctctgagcagctgtggctctcagtcacttaccccctcaccttctcacttctcttcatgggtcttccaggatctgagggatgaagccagacacacctcctgcccttcctttgtcctctcctggtgagtgtcaccttcccgggctgtcaagagctggaccatgtgcccactcaggtgtgtcaccttcctgggctgtctagagccagtctgcatgcctgctaaggcgtgtcaccttccgctcaggtgtgtcacctttctgagatgtctagagccagtccacgtgcctgctcaggcacatcaccttcctaggctgtctagaggcagtctgtatgcttgctcaggcatgtcaccttctgctcaggcatgtcaccttcccgggatgtctagagctagttcgtttgcccgctcaggtgcatcaccttccgctcaggtgtgtcccctttctgagatgtctagagccggtccatgtgcccgctcaggtatgtcaccttcctgagatgtctagagccggtcygtctgcctgctcaggcgtgtcaccgtcccaggctgtccagagccgatctgtgtgcccattcagctgtgtcaccttctgctcaggcatgtcaccttcccgaggtgcccagagctggtctgtgtgcccgctcaggcgtgtcaccttctgctcaggcatgtcaccttcccgggctgtctagagctggtccgtgtgtccactcaggtacgtcaccttcccaggctgtctagagccagtccgtgtgcctgctcagatatactgtcaccatgtgggccctactcttgtgtcagggccattagctggcacatgctgtgtggttgcctggtgcgcgctggggcaacctcgggaaacactcttagcctttgtattgatctgtgcaggctgccaaaacaaagtgatgccaactggggtcttatacaacagaaatctttctcagctctggagcctggaagtccgagaccgaggtgcggcagggtgtcagctactcagaccaaggtgctgaggctgycctgcttgccctgcagatggccgtctccttgctgcgtcctcactaggcctttcctctgggcgtgcatcgctcgggtctctatatcataatctccccttcttagaaggacaccagtcagatgggattagggctacctgaacaaccgaatgagaacttcttcacctcttaaagaccccatctgctgatacagttgaaatgccgagggtcagggctgcaacatacgaattttggcagaacatagtttagcccataacaccctttccgagcctctgattatctgtctgtaaagtggggacagtagtaacaatgtgtaaaatgtcatgagggtaaaatgaggccaccaaacagtcagcaaaagaaatacctgcttatttcacagatagtcttttctccaaaatcccagtggtagttagcaagtcaggacagctgactccacctggtcctttggaactcagggaagattgggccgttattaggaagtgctgctctttgcagccaacagaacttcccaaggacgcccgccctccgcccttgcttgctatgtgtacgagttacaggaagtgtggctggtatagccccgcagctgttcagaaggagtgttttggtttgtcatctccacatgaaatgaatggagccaattcatactgtaactgagaaaagaacatttttcaaccattatttcttctccctactcactgttaagctctaggccacaataaatggctgcctgctgggactcctgcactctgggatgacacgttcaaagcgtgtgcccatgtaggctgctgcaagagggtaagcatgattggagtggggtcactggggtctggggagccagcctcggcccctcctggctcagcacagccctcgcggccttgggggcccacagggtcactctcccccaaccctcccacagcaccgggctgtctgctctgtgcttcactctgcactagctggttcctgagtaccaggaggcattctctgatatgctatggatacagttatggacaaaatggactcttaggaaggcagcaagtaaggggaatggaggggcaaagagcacacagctaaagattgcctgactcaactgtggtagtcactggtgcactgcaggttggcatttgcaccctgctagcatgtgctcctgaaactggggccggagagctttcttctctgtctgagcactcagagcagtgcctgccaatgctgtgacaatgaacgaatgaataagcaaaatgtcaacccattttcagagttttgtttaatgtccctggacctggatctctcttgagagtgagcattgaatgggccttccctgcccctactgagagctcagggcatggaccccaaacgcttgggtctctcctcttccctcttctgttgtaaatttaaatgtcagggggaaaaaaaaaaaagcaagaaaaatatgtaaataaatacatttgcaatcatatgttatcggatgagaagrgtagcggtttcaagagttacattcagagtaatcgttgagcacattgatggcaagttgatagtttcgttattatgaaatatttactttggacaaaggagtattcaaaactgacttacgaggtataaataataaaggacaaagtcatatatrtgccacccaggtgatgtaataatttgttttcttcccttctgtcagtagacatttgggttctgaagtttttgcctttaaaactaatgatgttacagatattctaggttgtgtgccctagtgctccagctggctggaattcatgggcggagttcgcgagaagagggaactatacagagaaagaattccagaggtctgcatggtatcccattgagtctgttgcagattacaaagtcatacatgcatttgtaaaccacatgaaaccagacaactattggggaactataagttgaacaaatttcagataagtgaacctcactagaactagaaaatatgtggacaagtatgaaaattttcttctattattttatttaaaagatgattaactgttcatgataaagttaataargatgtattttgtagtttataatacacgtagaaggaaaacatatgacaacaatagcatagaagatgagactggggaaatggaaatacattgttctaagtttcttactttatgaacaagtataatatttaagggcagactttgataaattaagaatgcatattaaaaatcctagaataccagtaaaaataaccagaatctatagctcatgggccaacagaaaagataaaatagaatgctaattcttttaaagaattagaaaaaatgtaaaagaagatagggtaaagggggaacaaagaacagatgggaaaaataacaagttggcagacttaaacccaatcatattaataattacattaaatgtaaatgttttaagattcaaataaaaagacatagattagtagactggtttaaaaagccagagcctgttatatattttctactagacaaaaataatgtaaaatgatgacagagtcctatgtaaagatggaaggaaaaaaaaaggaatacattgacagaaagatataagtaaaattgtatttattttcagatcacataattatttacatagaatatcttgaataatgttgaaaataactattaaaaccaataagtgaatttgagaagtttgaggatacaattttaacataaaatgtattctatttttatataatgtaattaaaaagtaaattataaaacagttgctttatgtatttaacattagcattattaaagattattatttaaagatatgcaaggcctctctactaaacagcataaaaacatgactgaaagaaattaaagaagacctaagtaaatggatctttattagttattggaagaggcrgygttacggagaggtcacatctacacaaattgccctctgcattcagttcagtcacacttttaaattatttcaaaatgcaaagagcctagaatatttaaaacaatcttgaaaaagaagaatgaatttgtaggacttacattacctggtttcaagacttcctacaaatctgtggtaatcaagacactgcagtaaggatcaaaacttagaacagtgcaacagagagagagaccagtgttttttcagttcttgtatctttgagaaagacacaaagtagatcaatgaggaaartaaagtcttgttggccaggcatggtggcttacgcctgtaaccccagcactttgtgaggccatggcaggcggatcacttgaggccaggagttcaagaccagccttgcaaacatagcaagacyctgtctctactaaaaacacaaaaaacagccaagcatggtggtgcacacctgtaatcccagctactygggaggctaaggcatatgaatcacttgaacccaggagacagaggttgcagtgagctgagatcatgccactgcattccagtttgggtgacagaggaagactctatcacaaaaaaaaaaaaaaaaaaaaaaaaaagtcttgtcaactaatggtgctgagcaactggatatccatttttttttccattccattttcagatcactttaatggttagaaatttgttccataacttatttatttccataggtttttggggaacagatggtatttggttacatgagtaagttctttagtggtggtttgtgagattttgtgcacccattacacgagcagtatacactgaacgtgatatgtagtctttcatccctcacccacttcccaaccattccccctgagtccccaaagtctattgtgtcattcttatgtctttacctcctcatagcttagctcccgtggataaccattttcagataaatattattcaccatgaccttgacctcacaccatacacaaaaattaatctgaactatatcatatacctaaaggagaagctgaaactctaaagctcttagaagaaaacatgagtatttttctgatttgggtaggcacacatttcttataacaccaaaataaaaaacaatgaaagaaattattaataaattaaactttattaaaagacttcattaagtaaatgaggaacaggccacagaatgagagaaatttttacaaaacacatatctgacaaaggacttctaagaagggtatatgaagactctgataactccataaaaggaccaacaacccagtaaataactggacaaaatatctcacattttcatcgcaaagacacataatacacagattggcccctgagctcatgagaaagtgctcggcrtcatcagtcattagggaagtacaggttaaaaccacagtgaaagacatctgcatatatcccagggcagctcagatcagacaccaccaagtgtcgcagagactgccgcagcctcgcctctcgtatacattggtgggtgttaaaatgttgtaacctctttgcaaaaggtctagcagctgcttataaaactaagtgttctcctaccccrctacccaacaattccactctagggcatttatccaggagaaattaaaacctacgtccacaaaaacgtattcaagagtgttcacagcagctttgcttgctttatttataattgctgcaattgggaattgcttgtatgtccatctgtaggaaagtggataaattacctgagggatatccatgtagagcctgttcctatctgtgaacttagcattgaaaaggaataatccacagacacacacagcctcgtggatgagtctcggtaacgtcatgctgagcttaaggagccggacacagcaagagcctgcctctgattatatttattgaagctctgcagttgccaaaaacaatctggatagggaaaagttagaagaggaactgcttctggggttgtgcaggcagtgagaaactgggaaggggcatgagggaatgttctagaccatgacggccatggtctatatcttaacaggttaggtcacataggtatctatctgtgtttgtcagaattcatcaaatgatgttgaagatggtacatttcactgtgtgtgtaaattccaccttaaaggaaaaaagaaccataaatggacattgaactcttaatggtatatgtgctgaaggacttggagagagtacactgatgtctgcagcttattttgaaatgcagcaaaaataataataaaatggatatggggtggagagatggatagatatatgataaaaacaaatacaggctaaaatgtcaattatatcatctgaggtataaagctattcattgtaaaactcttccaactctatgtggctggggtttttcataatatgttggaggaaaatagtaaatattatggatttttattccttgaaagcaaatttgggggaaagatcatgaaaactgtggcctccttatcccagatggtgaagatacaacctagtatggcctcagcgagatactgagtgcactctcagtttgcacctggagggcagggtgagtctgggaggtctgtgaattgtcagtggacctcccggtccyctccagagccctgcaggatcgggtggatacactgacctgatggacaggaagaggaagcctctgggccagacctttggacactgttgccttactcttcttctctccagccaagcgagtggccttgggaggtgagtgtggtgtcgccttgcagccttgcactcagctttgcagccgtccctgtccagccagcttccacgcaagtggaagacacacagaatycacagcccaggcagctgctctcacctgtgtgtggagcacagggtgcccatcctcagagaccctgcccagcccctcgctgccatcccctctgctagaccaggcatgtgggtcagcgctgccctgtctggcccgaagttccatgtcagtagccgtggatcaaaygatgaaggcagagttatctaattacggagtgttttctctaatatttccacagcctgctgctgtcatggaacatggagattcattacttagaatgtcaaattaatagcgttcctggacctgaaacatcattgtgtcaacttctccaccttttccaggtggtggtttgagtttgtgcacatggcatgcctattgccccagcacggccacagctttccaaagtgccgcccagggctggggtctgcccacttcctcggaggtctgtccatgctcygggcaggctacagcctgcaggatgcagatgcccagattggagcagcaccctgtgccytcaagaggagcacagctcacacatccacgtaactcttgtccttagcagtagtgaggggcttctgcaggcagaggagtcggctccacggtcctccatgtaaactaccgggatcaggagcctagggttcaattctgctgtcacgtgtctgcactgtagcctgttctgccttctcaaccagccccttctagctcctggggcagtttctctttagctgaaacttcccttcatcttccaccaataccatgttgcgttacagtttccctcttctcacagaacgagccttgggagagragtgtgttctgtcacacagcctggccatggctcaggtccacaaggtcagctccagactctcagtgcaatgagggaccatgagtagcttctgcttgctgagtgctttccaagtggcggggcctctgccaagtgctttgtgatcctcatatccaagtggaggaaactcaactttagacagtgactgagctccaacagctgatccttggcacagatgagatttgaacctgggtccttctgactccagaatgcaagctcataggaaggggtaaatttactgggaagatctctgcyrgccaggtccttgatggcacagggccacgtgcaggtggagtccaggcgagacttgtccttgggaacacgagctggttttgaagctactgtagtcctgggttgcccgcccatgggtgttgtgaggacgctctccagcatcactgctgcccacgtgccctgaggggtcttaggttccaccccaggtcacattcagtgttttgtctgattcttcaccagaagggagcagcctcacgcagactgagcaggaacagtrgcattggtgttttccacagatcttttggaagaatttgaacttctgatcatgtatatatgacactttttaaagttttaagtgatgcatggaaacttgatattgtaaatttaaatatcagtcattttcagttttgtctctttgctgctcaaaatgaaaaatcttctcactcttcccctactccataatatgktcatggagttttgacctaattaaaagcatcaraattaagttgctaagtttgaatgggaatgtagtggtgtttaaggggacttaggagaccctgtcctcatgtcctttctgtcactataggttttgttactgtttaaagtccatctgcccagcttttagataattaattctaattttgagaacttgggagatgttgcaaaaactgttggagctgattttaagattggtgtaatatacctggtattactagagtcagtcagtgaagtcatagatgaagttgtgacatttggcccagggttccctgctgaattctgaaataccatgatgctatcaagagaagagccatgggttagccagtctccatgtgacacccagtgagcttcactgctggtactcccactcttgttccttctcggatggagtcaggtctggccccaagctacagcaggatatggaggaagtgatggtgtgygacttccgaggctaggtcataagaggccttgcagctcccagtgtcctcagtcacctgctgtgagggcagccagtaccatgtcagaggacatacaggcagccccaggagaggcccatgtggtgaggagccagggaagtcagccytgttggaaatagatcctccagccccagtcgagccttcggatgagtgcagctatgcagaagaccccaagtgacaactgctgagcccgayccttctgaattcaaggccatgaaagaaaggtcatttgtgttgtttggggccasgaagttggggattatctgttacctgtctgtagtgactggcacaagatgtgaggcactccccagtagttacttattcatcacacttcctttcatagctggtccttgtcctttcctctggtgtaaagtacagactgtgaagacccgccctctgttccttccagctgtttttggctgtctcttgtgtacaaatgctgtaggagatgcaaaggtgactcgcagcatcccccaagaatgcctgggcttggtgctgccagaaaggtatatgaggagccccgggtaagccagcactgcaggcagcaaggtagccttcagctgtgtgggctggggagaacttcatggaggaggtagcatttgcaccagactttgaggtagatgggatttgaacacatggagtaaggggaaacaacatggactgaggctgggcctgtgtgtgaaacagcaagcaatcccttctggctggagcaggggagggtgtgaggaggggctgccagcctccctccaggccaagaaggccatcaggtctcactgggggacagtgaggagctactcaaggcatgatgggagccaggctggacttgaacaggactyattggactgtccaggtgctgggtgagagagggaggaggggacatggagccagcaccaggggacaagggggacctgaagcagctgtgaccgtggatggcagggaaaagaagaagaagggattcattttggcatagagttgggaattgcagcagtcacttgagaatgacagagatgggaaggttagggattrgggtcagtggcatggacgtgagcgatgaacccatacaagtgggtgagaaaaaggctgaagaaggtgaggcagcatagggagtgggtgacgccagtgatggctgatgtggtrtgaccagaggaaggggccaagggggcggaccccgcagggtccataatggtggtgattgccttgggggagttcaggggtcgcagaagaggacctgattatgccatcctcacttgtaaattctgcttggtctcctgacgctatcagggtcagacccagccctctcatggcccgctgtgtggcatgtgctgctccctggctcttgcccatgcccctcctcctggccaagccacactccacctgcatcagccataggccctcccgccactgcccgcctgcaggtctcagcaccagcgttgcctccccagaagcctccctgaccatggtccctgttgtgtgccccaccaccccctgttctctgtccccctggtattggttcgtctgcttgtggtaactgctgaatgccagccccaatgcccccgcctcccatygccatcagcgtcaccagcatcacaaaggtcagcacgaggtagctgctcacagaatatttattaagaataagaaattaataaagggactaattggtaaatcttaacatgcccacactgggtcttttccccatgtcacgtgagcctgaacttggaayatccatatttccagaagacatcaggctckttctctagtgaccttagaratccccgcattgaagggagayggccctggcatggggcccctgccactsggtggggaggggtggggaccagactgtgccagggaccccaaggagttggagggtgcagagcttcttgacctgagtggacagggagaccctctgagctcatcctctgtaacaggatgagcatggactcttcaggggacaaacttcgtgcctcgtgtgaaaaacgaaagggccccacgggctgtgtctgatggtgttacccactgcacagggaaggcacctttgcaccccagtcccagccaggagagcagcaggtcgcaatgtcttgctagcctggcccctctgccctcaatgactttgcaagcaccttggcctccctgtcccactcccctgccggcacctgcgtgtccctgtcctgccgagctgcmagcctcacctgcgtgcctctcgtcctcatttgaataggtgagcaaccaaagtcagctgtgccgttggagccggattccatcactcaaaatccaggcacagctccttttgaattcctcagctgccccgaggcaggggctcaatgttgatactgagattaatccccaaagagcttctcatttctctgcagagaaattaaagcttgccagtttccttttgcccgtccttctgacagctctgtcagtaatgatatgcctgccgcgtggcataatccgtgtcccgtggtaaagaataattcattaagaaatttagggcccagctcctttccgttgggttggtcttcaaaagttaactaatggcggcagcagcacgatgatcaatggaaaattattgaacagagctcagggctgcttcagaccagctcaaggagccacctgggtggagagcagtcagacccacccacccccttagatttgtcagcattccctgaaacacagtcagacggtgttgatatgaggtgtctgctgggcgtggacagtggggtggatggggtactgccctagtttgggaagcagcttatttttagccttgtagaagcagcgtgaagtgtctactggtaaagccagcacgacttctcctcccttctgaacaccagcaagaagcttctagatgtttctgatgaacaaataggagttcctgtactggctgagaggggcagcctacatacttaggttctttggggaggtcagtgcgtttttagcaaccattggcgcattgagcatgaaatggcgtggagctgaaactcactaccaactgcagtgaaaccaacaaatggaagacgtgaactgatgctggccctaatgactctgggcaagacgagggacattattgttttgcatgcattgataatgtgtcatctggaatcagattttctactttcatgttgttcgataacaaggttgtgccctgtgagtctgggattgtgtgaggcgagcgtgcgtattcattctactgcagaggaggctggggaggaatcagagcatcctgtgtctgcaaggtctggcgtgtttctaagggaaggcagagaaagccagtgctccaaagacagcagagcagacgcgaggtttgcaggcatgaggatgacaaatgaaattcgcagaattcctcagacttgatttccctcccttctataattaacctcagggataccttgactgcgctgaggtccatgtgcttgagcacttgctgtcctgcttgccctgccctcctctgatttttttttgcacagcatgattctatttctgctattgttcagaaaccattagcacctattcagaagtcagttattcagctttgagctgaatgacaattatttgaatggtaaagggtgttaatgtataattattcacattcataccaggacagtcacagtttaatcatttctctgtaggcttccttaagtttgtgcttaaagtcttaggcataattcttttgttaaataagtttaggaggctctaagtattgggaaagtgagtataaatacgcctctgkgggagcttcaaggatgtggtgcctcacctccaggagcgagcctcctaggtgaaactgtcactaggygccccacacttcagccaggaggaaggtccatttccgagggctggtagcataatctggcctccaggtgagctctgaggtygtgttctggcgtgcccaggactagatggagcctaccrgggcattcctatgtgtgacacagagccctgccaggcccggtcgggctcagagtgggcttaacccttcagaccctcgattcctctggacccctctttaagatgattgacgaccccaaagagcttttgatgataagggctatattgtgcacatttgccatattggaaattaaacctaagacttttttttttttttttttttttttgcgacggagtctcgctctgttgcccaagcttgagtgcagtgacacgatctcggcttactgcaacatctgcctcctgggttcaagagattcttctgcctcagcttcatacaccctgcatatgcmggctgcctcctcaagcagtacagctgggattacaggcacccgccaccacacccggctgattttagtgtttttagtagagttgcggtttcaccattttggccaggctggtcttgaactcctgatcttgtgatccacctgcctcggcctcccaaagtgctgggattacaggcctgagccaccacgccctgccctgagactttttaaatgtattaacttatttaaaaataacaacagtaaacctatggcaggatatcataggtaatatgcttctggaaatgagttttccaagacagacacttgaggagagtggcactgttgtccatttttgcagaatggaatgccttgatgcctgcctcagtggaagacagctgggttctcagatctgcctctgcgtttaatctgttgtgttgtcacatcacgtagcccccagaaaactcttttgtcacctgtaagagaatgagaatctaaaaggcaaataacatcctagtattgctatggaaatgattttgacctcacaaaccccctaaaggggtctcaggaacccctgatgatccctagaccacattttgagaatctctgttctaaaaagtccatttcttttactctaaaatattactcacattgcctgatatgttgtgggctcctccttttttaaattttttttattatactttaagttctagggtacatgtacacaatgtgcaggtttgttacgtaggtatacatgtgctatgttggtgtgctgcacccatctattcrtcatttatattaggtatttctcctaatgctatccctcccccaaccccccaccccccgacaggccccartgtgtgatgttccctgccctgtgtccatgtgttctcattgttcagttcccacctrtgagtgagaacatgcggtgtttggttttctgtccttgtgatagtttgcttagaatgatggtttcsaacttcatccatgtccctgcaaaggacatgaactcatccttttttatggctgcatggtattccatagtgtacacatgccacattttctttttttttggcattttttttaatttattattattatactttaagttttagggtgcatgtgcataatgtgcaggttagttacatatgtatacatgtgccatgcttgtgcactgcacccactaactcgtcatctagcattaggtatatctcccaatgctatccctcccccgtccccccaccccacaacagtccccagaatgtgatgttcgccttcctgtgtccatgtgttctcattgttcagttcccacctatgagtgagaatatgcagtgtttggttttttgttcttgcgatagtttactgagaatgatgatttccaatttcatccatgtccctacaaaggacatgaactcatcattttttatggctgcatagtattccatggtgtatatgtgccacattttcttaatccagtctatcattgttggacatttgggttggttccaagtctttgctattgtaaataatgccgcaataaacatacgtgtgcacgtgtctttatagcagcatgatttatagtcctttgggtatatacccagtaatgggatggctgggtcaaatggtatttctagttctagatccctgaggaatcgccacactgacttccacaatggttgaactagtttacagtcccaccaacagtgtaaaagtgttcctatttctccacatcctctccagcacctgttgtttcctgactttttaatgattgccattctaactggtgtgarayggtatctcmttgtggtttggatttgcatttctctgatggccagtgatggtgagcattttttcatgtgttttttggctgcataaatgtctacttttgagaagtgtctgttcatgtccttcgcccacttttttgatggggttgtttgtttttttcttgtaaatttgtttgagttcattgtagattctggatattagccctttgtcagatgagtaggttgcgaaaattttctcccattttgtaggttgsctgttcactctgatggtagtttcttttgctgtgcagaagctctttagtttaattagatcccatttgtcaattttgtcttttgttgccattgcttttggtgtcttagacrtgaagtccttgcccatgcctatgtcctgaatggtaatgcctaggttttcttctaggttttttatggttttaggtctaacgtttaagtctttaatccatcttgaattgatttttgtataaggtgtaaggaagggatccagtttcaactttctacatatggctagccagttttcccagcaccatttattaaatagggaatactttccccattgcttgtttttgtcaggtttgtcaaagatcagatagttgtagatatgcggcgttatttctgaggactctgttctgttccattggtctatatctctgttttggtaccagtaccatgctgttttggttactgtagccttgtagtatagtttgaagtcaggtagtgtgatgcctccagctttgttcttttggcttaggattgacttggcgatgcgggctcttttttggttccatacgaactttaaagtagttttttccaattctgtgaagaaagtcattggtagcttgatggggatggcactgaatctgtaaattaccttgggcagtatggccattttcacgatattgattcttcctacccatgagcatggaatgttcttccatttgtttgtatcctcttttatttcattgagcagtggtttgtagttctccttgaagaggtccttcacatcccttgtaagttggattcctaggtattttattctctttgaagtgattgtgaatgggagttcactcatgatttggctctctgtttgtctgttattggtgtataagaatgcttgtgatttttgtacattgattttgtatcctgagactttgctgaagttgcttttcagcttaaggagattttgggctgagacagtggggtcttctggatatacaatcatgtcatctgcaaacagggacaattttacttcctcttttcctaattgaataccctttatttccttctcctgcctgattgccctggccagaacttccaacactatgttgaataggagtggtgagagagggtatccctgtcttgtgccagttttcaaagggaatgcttccagtttttgcccattcagtatgatattggctgtgggtttgtcatagatagcacttattattttgagatacgtcccatcaatacctaayttattgagagtttttagcatgaagggttgttgaattttgtcaaaggccttttctgcatctattgagataatcatgtagtttttgtctttggttctgtttatatgctggattacatttattgatttgcatatattgaaccagccttgcatcccagggatgaagcccacttgatcatggtggatcagctttttgatgtgctgctggattcggtttgccagtattttattgaggatttttgcatcaatgttmattaaggatattggtctaaaattctcttttttggttgtgtctctgcccagctttggtatcaggatgatgctggcctcataaaatgagttagggaggattccctccttttctattgattggaatagtttcagaagsaatggtaccagttcctccttgtacctctggtagaattcggctgtgaatccatctggtcctggactctttttgttgataagctattgattattgccacaatttcagctcctgttattggtctattcagagattcaacttcttcctggtttagtcttgggagagtgtatgtgtcaaggaatttatccatttcttctagattttctagtttatttgtgtagaggtgtttgtagtattctctgatggtagtttgtatttctgtgggattggtgatgatatcccctttatcattttttattgcgtctatttgattcttctctctctttttctttattagtcttgctagcrgtctatcaattttgttgatcctttcaaaaagccaactcctggattcgttaattttttgaagggttttttgtgtctctmtttccttcagttctgctctgattttagttatttcttgccttctgctagcttttgaatgtgtttgctcttgcttttctagttcttttaattgtgatgttagggtgtcaattttggatctttcctgctttctcttgtgggcatttagtgctataaatttccctctacacactgctttgaatgcgtcccagagattctggtatgttgtgtctttgttctcgttggtttcaaagaacatctttatttctgccttcatttcrttatgtacccagtagtcattcaggagcaggttgttcagtttccatgtagttgagcggttttgagtgagwttcttaatcctgagttctagtttgattgcactgtggtctgagagatagtttgttataatttctgttcttttacatttgctgaggagagctttacttccaagtatgtggtcaattttggaataggtgtggtgtggtgctgaaaaaaatgtatattctgttgatttggggtggagagttctgtagatgtctattaggtcctcttggtgcagagctgagttcaattcctgggtatccttgttgactttctgtctcgttgatctgtctaatgttgacagtggggtgttaaagtctcccattattaatgtgtgggagtctaagtctctttgtaggtcactcaggacttgctttacgaatctgggtgctcctgtattgggtgcatatatatttaggatagttagctcttcttgttgaattgatccctttaccattaagtaatggccttctttgtctcttttgatctttgttggtttaaagtgtgttttatcagagactaggattgcaacccctgcctttttttgttttccatttgcttggtagatcttcctccatccttttattttgagcctgtgtgtgtctctgcccgtgagatgggtttcctgaatacagcacactgatgggtcttgactctttatccaatttgccagtctgtgtcttttaattggagcatttagtccatttacatttaaagttaatattgttatgtgtgaatttgatcctgtcattatgatgttagctggttattttgctcgttagttgatgcagttttttcctagtcttgatggtctacattttggcatgattttgcagcggctggtaccggttgttcctttccatgtttagtgcttccttcaggagctcttttagggcaggcctggtggtgacaaaatctctcagcatttgcttgtctgtaaagtattttatttctccttcacttaagaagcttagtttggctggatatgaaattctgggttgaaaattcttttctttaagaatgttgaatattggcccccattctcttctggcttgtagagtttctgccaagagatctgctgttagtctgatgggcttccctttgagggtaacccgacctttctctctggctgcccttaacatttttccttcatttcaactttggtgaatctgacaattatgtgtcttggagttgctcttctcgaggagtatctttgtggcattctctgtatttcctgaatctgaatgttggcctgccttgctagattggggaagttctcctggataatatcctgcagagtgttttccaacttggttccattctccctgtcactttcaggtacaccaatcagacatagatttggtattttcacatagtcccatatttcttggaggctgtgcgcgtttctttttattcttttttctctaaacttctcgcttcatttcattcatttcatcttccatcgctgataccctttcttccagttgattgcatcggctcctgaggcttctgcattcttcacgtagttctcgagccttggttttcagctccatcagctcctttaagcacttctctgtattggttactctagttatacattcttctaaatttttttcaaagttttcaacttctttgcctttggtttgaatgtcctcccgtagctcggagtaatttgatcrtctgaagccttcttctctcaactcgtcaaagtcattctccatccagctttgttccgttgctggtgaggaactgcgttcctttggaggaggagaggcgctctgctttttagagtttccagtttttctgctctgttttttccccatctttgtggttttatctacctttggtctttgatgatggtgatgtacagatgggtttttggtgtggatgtcctttctgtttgttagttttccttctaacatacaggaccctcagctgcaggtctgttggagtacccggccgtgtgaggtgtcagtctggccctgctggggggtgcctcccagttaggctgctyragggtcaggggtcagggacccacttgaggaggcagtctgcccgttctcagatctgtagctgcgtgctgggagaaccactgctctcttcaaagctgtcagacagggacatttaagtctgcagaggttactgctgtctttttgttggtctgtgccctgcccccagaggtggagcctacagaggcaggcaggcctccttgagctgtggtgggctccacccagttcgagcttcccggctgcgttgttaacctaagcaagcctgggcaatggcgggtgcccctccccaagcctcgctgccaccttgcagtttgatctcagactgctgtgctagcaatcagcgagactccgtgggcataggaccctccragccaggtgcgggatataatctcctggtgcgccrttttttaagcccgtcggaaaagggcagtattcaggtgggagtgacccgattttccaggtgccgtctgtcaccaatttctttgactaggaaagggaactccctgaccccttgcgcttcyggagtgaggcaatgcctcgccctgctttggctcgcgcacggtgcacgcacccactgacctgcgcccactgtctggcactccctagtgaratgaatccggtacctcagatggaaatgcagaaatcacccatcttctgcgtcgctcacactgggagctgtagaccagagctgttcctattcggccatcttggctcctccccatgtgccacattttcttaatccacatcattgatgggcatttgggttggttccaagtctttgctattgtgaatagtgccgcagtaaacatacatgtgcatgtgtctttatagtagcatgattcacagctgaattctaccagaggtacaaagaagagctggtaccattccttctgaaactattccaatgaatagaaaaagagggaatcctcactaactcattttatgaggccagcatcatcctaataccaaaggctggcagagacacaacaaaaaaagagaattttaggccaatatccctgatgaacattgatgtgaaaatcttcaataaaatgctggcaaaccgaatccagcagcacatcaaaaagtttatccaccaccatcaagtcggcttcatccctgggatccaaggctggttcaacatacacaaatcaataaacatgttccatcacgtaaacagaaccaaagacaaaaaccayatgattatctcaatagatgcagaaaaggccttcaacaaaattcagcagcgcttcatgctaaaaactctcagtaaactaggtattgacggaacgtatctcaaataataagagctatttatgacaaacccacagccaatatcatactgaatgggcaaaactggaagcattcactttgaaaatcggcacaagacaaggatgcagtctctcaccactcctgttcaacatactgctggaagttctggctagggcaatcaggcaagagaaagaaataaagggtattcaattaggaaaagaggaagtcagttgtctctgtttgcagatgacatgattctatatttagaaaaccccattgtctcagcccaaaatctcctcttttttattttcgaaaaaattacagcagagttcactcttcttggtgtgcagcaggaggtgcacgtgctgtgcttgtccatcagtgtctgctttgtgcatctctgttgacctgcctctaacactgggacgagcatcagccaaatcagaaccaggtcagagcccctacgccctggtcagatcagaaccaggtcagaactcccctacaccacagtcagatcagaaccaggtcagaacccctataccaagcttgtccaatcckcagcctgcgagccacctgcagcccaggatagctttgaatgtggcccaacataaattcataaactttcttaacacattatgagtttttttatgattttttttaactcctcagctatcattagtgttagttattttatatgtggcctaagacaattcttccagtatggctcagggaagccaaaagattagacacccctgccctacaccttggtcagatcagatccaggtcagagsccctacatcctgtccccacagtggacaggttggaaatgtaaggtcgtgtggccactgggggcccaggatgggctctgcctcagaggcacttccttccacctggcctgttttaatcaacagtcattaaagggaaatctaaagatgtttaaaacgttgtgtattttctcgttagcagagccaagaatcagtctgcagggagcaaagagcttgagtgtggagttagaagtcggggtccgggaaagggtgcttgtttctgaggctaacatgcatcaggtgctccaagtgggctctcattgaccccaggatgccatcagcccccttgccctgcctggagtatatcacatgggccctggstgcctgggcctgtggagccacagctgctgaggwcmggtgtttttaaagcctgagagaggccatctgggggtagcactacaggagatgggaagaggcccccaggaaaccagggagagcaagaaggtcttctaaggactcatgtcctcttaccaactaccatgtagttaagaatgccttacgaagggggacrggagagtcaagggatagaaaatcagtccttaaaatctgcactgtcctttccacatacaaagcacctttcacacaggtgagctcatttaccctcagatggcacttactgttgtgggaacctcattttaccaggaggaaacggaggggcgacaggacagcgttctaggaagtagctcagctgtggacattttgtggtgagctctcagggacagcagcaggcatgggatgcctgcagagaggctttcaggagagcgctggccccacctgcaggcccccagggcgaccttggataggctgccgtctgggcctgggagacttctcacctgcagagtggatgatgggggaccttgaggactgaacaggagaaagcacactgaacmgagcctggtacctagtaagcactcagtaagtcttggcacttactgtgataattgcattttaagcccagctaccaaaatttccagacctacgttaccatcttcaaatgagtgcccctacccgtttccctaacgttgctcaaacttgcattttctgaggagcgtctgttggatgcctttggcccttgcaccacgtacagctttccacgcttattggctggccactgggtaccaaggaccatggcgggcactctggaatgctctgttttggcaaactttcttccccaagaacrgatttgacttttgaaaagtggtctgaaagtcagcctccccagccctggtcacagcagaaatagttttggacccaggtgagttgagtccacaaaataacaggccgtgtctacttgagctgaagccttatcagttggcccagtaggtcccatctgaagaagccctgtatttttgaaaaatgttaactctccctaaaaggttacattgaacggcaacacccgggaggctgctgttggccttgccagcaagctgaacctgcagttgagtggccacgcgtgtggtgcgaggcgtgcagcccatccctgagggctcccctgcatgggaaaggaggctgggaggttcgcyaggactgcatgtggccctcgcaccaagaacctgacccatggtggaggtggtgagtgctgtgtggtcggccttgatgtttatacgagagtctctgaggtgtagacatcagtgtctccattttggggagagggaggcggttttcttcccagcttaccattaccactgtgttcgaggagggactgatatttcgagtggggtcaccatcacactcacaccaccaaggctgctttccaccactcagctttctcatgcatcccgtttcccagaggtggccagtgcctgggccctgagtcggttgagactcatccagagcagagcygcaraagctgggctggctccagacagagatgacccaaagcctgtgtcagcatttgggtgcctgggcccaccgtycaggcctgagagagcatcagtgaggctcggagcccccatcagccaggtcaggccgtggctctgagcctagtgctcctttctaaatgggagttgcaacgccagctttgcaaagtggttgtcagggctcactgaggggcyctggggagactttgggggaaggataatgattggggaagtagaaattggctcccaaaatgctagagcaggacttaagggactgatggccaggcacctgcccagtgtggcatcctcccatcgttggctcgagcgctgagctgcacctctgtgtcaggacttgctctcagtgttctgtctggggaggtcatgtgcctactgggtggggcaggtccttgtgtgggaggagccagaarctcccttttttcttaaaagttattgggccagaggtcatgaattcacccttagcctatgatctccagtaactctaccatccgcaggaaaatgacttcacaccatgcgyagggctggaaggagcactgggatggagtcccacctcggtgcgcgacccggggcgttcagcagtgccccaggaccgcagcagcccatgctcagagccaggtcctcagggccggggcattcagcagtgccccactaccatagcagcccatgctcagagccaggtcatcagggccagggcattcagcagtgccccacggctgcagcggcccatgctcagagccaggtcctcagggctggggcgttcagcagtgccccactaccacagcagcccatgctcagagccaggtcatcagggccggggcattcagcagtgccccacggctgcagcggcccatgctcagagccaggtcctcagggctggggcgttcagcagtgccccactaccatagcagcccatgctcagagccaggtcatcagggccggggcattcagcagtgcctcacaactgcaacggcccatgctcagagccaggttctcagggccggggcgttcagcagtgccgcacgactgcagtggcccatgctcagagccaggtcttcagggccggggcattcagcactgccccaccaccgcagctgcccatgctcagagccaggtcatcagggccggaagatggcaacttgatgcttagccttcaaagaggtggtaaacgataaaaaaacggagccatgcctggattcaagagcctctgaaatcctaccacctaatcactgtcttccctaatttccccttggccgctatgtgggtggtatatggtgggctgttgggtggagcggggcgggtcgttactgatctatctggaatacccgctttatctctacccagcaaactgctacccatccaagacccaggcccacctgtcacttccactctggcacctcgttcgccatcacctcactcaggagggttccactggtgcttgccggcgaacgccaccattttttgcagcatatctcatagcttgttggaaacccacgttgagttggggctttgttcatccacaggtgctgtcacgcatccgttttcaggagacagagatgtcctctgtggccctccgttggccgaccctgttgggtgcagcagctgtcagtggacagaggtgcatcagtgcgttggttggtggcatcgtggcctcaccggcccacagttctgacagaggtgtctgtgtttcacyaactcagtctgtccctgcccattgtccgcacactcattccctccatgccccagtctggcaccctcaagtgcaagtgcgtgcatttaattcacgtagtgtgttggttgggtgcactcctggacctttggggagactgtcttcttccatgttagctgcttccttcttccctgtggggtcatagaggtcacagctgacatgctgaaacaaatgccattgttttcacttaaaccacattgtattccatagccgctgtgtcatatgcgtatatataatagtgtgtaaggcgtatggaaagaagagattgtgtccagactggctacagatggtcatcctaatggcggaagcagccaggccagttgggcttgactctggagctttggagggccatcctcagtgtatttgtttttatttgtggaggccccgcagcgctcatgctggccatgcctggctgggatgggatgacctggtgaggacagaggaggacagcctctgcttccatgatgaataaaacagcatctggctgggtaggaggaaagcctgtgcttgttcagcctcaagtacgtgtttgaaagcttgccccaaagacattccaaaaaccaggcagtggtggtgtcctgtccttctagaggccaggttgtccaggcccaggggagtcttgcttaggggtcagtgagcgctgggactcagtctggctcctggcaagcccagagaaccccactgctgagtctctacacaaggcattggacggggctgctgtgggtgtgcgccaggccacctccatgcctgggcagctgtgcacaagctggctatgagctccatggcatacagagcacgtccaaactaacctggtagcccagtcccatggaaagtgtgtgacatcgtgtccctgccttcggagtgagcaagccacaagccagatgtcaggggctgttccttctgcaggtcacccactggctggccaagcaccgtgaagctgggcgcacctcctccagggaccatactaaagcagctagcagcaccttccccctgctgtgaaccccatgcctgacctgagcctgagccctcacaggcctggcaaaggctgcctgcagaggcctgggccacacaggccctatggctttcctgcgtgccacggagagccagccagtggggctgcaggcacctcctcccgctcactctcagtgtgcgcctccacagggaccacagaccacaggagctcctggcccgccacatcgccagccgtgtgcgcaaggtttatcaggttcctcttggccaggttgaagtagatgccgggtggggatctgtaggccctggttgtgtttacagaagatgctgcccttcactgtcttccagcctcccaggaaaggatggtccccaggctccatgctgacaccacccaccttgcttcacccagtaggcgcttactgtatgtctactctaggtcatccacagtgctgagtgttgggatagagccccgggaggtaggtgcctggtcctccgtgagtctggtggaggagccctccgtggtgacagccttctgtgagagcatggcaggtggtggggcctcgtagagggwaagattttgcagaaaatgtgacctagattcccttttaaataggaartactggtccctagtgtcttgaactttggggagaaaactccctttgattaaagagaaggtaacttggaaatgtgttttccctcatctttttgttaatttattttttaaattaacatgtagtgaaattggctttttgtggggtatacagtcccgtgaatgttaacgcgtgtgtgtgtttctgtaaccacccccaaaatcagggtgcagaggagttccaccacctggacacccccacgccgccccctggcagccacggcctctccccacccccattccagctctcagcaactgcgacgtgttctccaacaccgtggctttgtgtttttgagaatgtcttataaatggaatcagacagtatttaacctttggagcctggcttttttcactcaggttaatgcctttgagattcatccaagttgttgcatgtatctacagcttattcatttttcttgctgagtgtacgctaccgtgtgggtatatctccattgatctgttttttattttggccattctaatagatatgtaatgatatctcattgttttcatttgcgtttccccgatggccagttatgttgaacatcttcttttgtggttattgacccctccttatatcctctttggggaagtgtcaattcaagtcttttgccttttttttaagttaggtggtttgttgagtttcagtttggaactgttgagtttggaaaaatctttatatattctggataggataggactcttgttggatttcttatttccaaatattttctcctagctagtagtagctagtcttttattctcttaacactgactttcagccgggtgcggaagctcatgcctgtaatcccagcactttgggaggccaagggggcggatcatgaggtcaggagatcgactgcatcctggctgacacagtgaaaccctgtctctactaaaaaaatacaaaaaaaattagccaggcgtggtggcaggcgcctgtagtcccagctactcaggaggctgaagcaggagaatggcgtgaacccgggaggcagagcttgcagtgagccgagatcgcaccactttgctccagcctaggggacagagcgagactctgtctcaaaaaaaaaaaaaaaaacaaacaaaaaaaaacacctgactttcatagaccaaactttttcacaaacaagttttttttccctttttaatgaagttcaatttatctctctcttttttttatcatgatttgaaggacatatctaacaactgtttgcctaaccccaggtcatgaagatttgtcatatagtttctttttttttttagtttaatgttttacatttaaatctatgatatattttgagttaatttgtttaagtaagtcatgagatttacatcacgtttcactatttgcctatggatatccaattttccagcacctctttttgaaaataatatgctttcttcattgaaatccctttgcacctttgtcaataaacatttggtcgtgcttcagtaggtctattttggaaatctctcttctattctgttaactccatccagtaactccatcaatactccaacaagctgggtatttatccctttgcaaatacataattattattatgtatagtaagtcttgaaacctgtcagtgtgatttctctaaccttttttgtctcttgtaaaatatgttggctagtctcaatcctttgccctttcatctaaattttagagtcaacatgtctatctgcaataaattcttctagggttttttaattggaatgataataaacctataggtcagtttgttagaattcaaattttatgatattgagatttccatgaacatgatatgtctcctcagttattcagacattcttgtgattactttttcagcattttgtaatttccaacaaacagagcctatatacaaattgttagatttacatctaagtattttatttggttggagccattatcagtggtatatagaaaggtgattgatttttatttagtaaccttgtatctagtgactttgctaaactcacttattagttctaagacttttctattatttcctgggtattttcccatagacaattatgttgtctgcaaatagggagagtttgtttcttcttttctaaaacaattgtcttctatttcctcatcttgctttttttgcacagttaggtatgatgttaactgtgggttttttgcagatacagttgtcagattgaggatgttaccttctgttcttaggttgctgagagcttttatcatgaataggtgttaaattgtattaaatattttttctgactggatatagattatgtgtttttctaggatattaatatgatagctattgttcgtttttaatagcctttgtttttagaatagtttcggatttacagaaaaattgaaaaatcagtagggttctctgatactgcacacctattttcccaaattataccattgattcttattatgatgacatttacacttgacatcttacattagtacggtacatgtgttatgattcatgaaccattgttggtaccttaatattaactaaagtcctatgatcttgaagttttcttagtttttacctactgcccttcttccattccaggatcctgccttggatactgcattcctagctcctttggcccctcttggctgtgacaggtccttagttttagatggcctagacagtgttaaggagtactgattaactattttgtagaatgttcctcttttggaatgttttatgcttttctcatgatttgactggagttacagtgtgtgaggagaaaaaccacataggtaagctgtcattttcctgagatcgtatcaaggagtcatgctgtcagtgtcatttatcattgttgatgtcaactttgattacctggctgggtagtggtgtttgtcaggtgactctatgataaagttaccttcccccatctcccctgcgtactgcactcgtcccgaagaagttgctgtacctaacacacttaggaatggggagttacgctccttgaagacagagtatctacataagttactgggaatgcttctgcatgggagagttcttctccctcacctatttctgtattcagtcatttttttatgttagtatggactcagggatattgatattttgggttgtcttccaatactactttattttgttgctgagattatcccagttttggccatttgggagattgtgcagtttgctcctgtgtccctttgtcgtactctcctcatcgtggtttgactggaatgtttgtctttgttcttttgcttcatttcattttggagtgtgtcctgactttctgatactgcaagattctcaaggctcatcttgtgtatttcctgtcccagtcctagggaggaaaaggccagttcttgaaggagtcttgtgtcttttattataaaatgcatgagaaaccatggactgggcactaggtttgctccttgctatgggggtggtgttgtttctaagtcttctcagttgacagaccacagaagtagctttctgtatactaacccacggacagataaatattgtaaacatttctgtatgcaattatctgtgtctatattaagctaaacattagttcctaytgatatctgcaactctaatccattaccacatggattcttctagcctcctctccttacttatctgtaaaatcccactcacaatgagaaacctggctcacactttctgccatccatttacttaattattcaagcccagtatacatatagaatagtatcagagagtttaacacctgtgctcatgggaaacaactttatcaactagagttcagtatttatgtacagttccttttgcctttagtcttacagactccactcactttcaagttacttttggagaaatcagctcccctcccccattcagtgaggacgttttataagtttataatacagtcagattctcttgtcacagtctgtgtttcttcccaggatcccctgatctcctaaatattttgttgttgttaatttacatacattgcttagattcactctttgtgctgtaagcttctatggcctttgatagatgtatgatatcatgttttcaccattacagtaacatgcagaataattttacaccctaaaaatccccctgtgctccacctattcagtcccccgctccttctgaaagtgccccggcaaccacttatcttttttctgtctatatagttttgcttcttccagaatgtcatctagttgggatcatacagtatgtagccttttcggctggcttcctttgcttagcaatatacatttagttttctccgtgtcttctgcatagctcatttttttcactgaataatattccattgtatggatgtaccatagttgtttatccgttcacctatcgaacaacattttggtcacttacaacttttggcagtgttaataaagctgctataaacattcacaggcaggtttttgtgaggatgtcagttttcaaatcagtagagtaaatacctaggtgtgcaattgccagatcacatggtaaggctctgtctttgaaagaaattgcaaaacagtcttccaaagtggctttaccattttgcattcccatcagcaatgattaagcatcctttttgctccacatccttgccagcagtttttggtactgtcactgtttggatttttagccattctaaaagccattgtaatcatattcattattttagtgtgcagctcctaaagacaaattatgttaaatatctttccttgtgcttatttgtcacctatatatattctttggtgaagtgtctgttaagacttgcccattttttaattgggttgtttgacttttttcttgttgaattttaagagtctttttataatatattttagatgcaagtcttttttcagatatgtgtcttacatatatcttctcctagtctgcctctcgttttcagagtctcagcatcttttgtagtaaagaagtttttaattttaataaactccagcttattcatttttttctttcatgaatcatgttgtatctaaaaactcttctcccaacctaaggttgcttagattttctcctgtgttatattctgaaagtttatgattttcccttttagatttaggtccatgatccattttgagttcatttttgagaaaggtataaagtctgtatctggattcacttctttttcgtgtgatgtctaattgttccagggccatttgtttaaaagactatgctttctccattgaattgctttttgcttttttttgtcaaagatctttgtcaaagtctaaatttggcccttgtatttatgggttccacatccatgtattcaaccaactgcagataaaaaatgttcaacaacaaggaaagaatggttgcatctttactgaaagcgtacagactttttctccttgtcattatcctctcaacaatacagtataacagctatttacatagcatttacattattctagatatcctaagtaatctagaaatgatttaaagtctacaggaggatgtgcaagggttatatgcaaatactatgccattttatatcaggaacttaagcatccatggattttggtattctagaagggtcctggaaccaatacccaatggataccaaggaatgactgtatatctgtgtgtgcctgtttcattgacctttgtgtctgttcttttaccaatgccaccctgtcttgattactgtagtttcataatgtagatttattttcaaatattgaatcagccttgctttcctgggacaaaccccacttaattttgatgtcttgttctttttatatattgctggatttgatttgccaatattttgttgaggatttttaccctgtgttcataagagatactgaactgtactcttttggtttctgactttttctggttttgatggtggagtaatgctggtctcataaaacactttagaaaatgttcctttctctggaaaaaattatgtcaaatcaatcttatttttaaaacattttatagaattcactggtaaaaccatcttggccctagaggtttctttttcagaagattgtaagctatgaattcaacttctttaataattataggagtattcagtttcatcttggataagtttggtagtttgtagtttttgatgcattggtctattcgcagttgttggattttagtacacagttatttgtaggaataccttattatctctttaatatctgtgggatctgtggcaatatcttctcttttattcctgatattgattatttgtttcttcttttctgtcagtcttttagagatttataaattttattgatcatttcatggaactcatttttaatttcttggattttactcttatcatttgtctgttttcaattttgttgattttcgcctttgcctttattatttcctttctggttgttttgagtttatttttctcttctttttctggtttcttaagttggaagtttagattattgagacctttcttttttaatatagacacttaatactataaattttcctctaaatattgttttagctttgtcccataaattttaatatgctttattttcagtttcattctgttcagtatactcttttaattttccttcagactttctctttgacctattgattatttagaagtgatatgtttactgttcaaatgtttggagaattttctattatggtttttgtcgatttctagtctaattccattatgatcagaggatgtaacttatatgattgcagtcattttgcatgtgttaaggtttatggcccagaagaatatggcatatctttgtcaatgttttatgcacacttgaaaagagtatagattctactgttattgggtggagtgttctgtaaatatccattaaatccaatcggttgataatattttttatttgtgtatctttgctgattttctgtcacctagttctattgattattgagaaagaggtgtttaggtctccacatataattctagatttgtctaattttccttgaattttttcatgagttttgaaatctgttgtaagacacatatacatttagaattgatgatttctttttgtgaattgaccctctcactatgtaatattcctttttaccctctgggaattttatttgttcttaagtctgctttgtcttttattaatttttttttacatttgtgtttgcatggtatatctttttctatccgtttacttttaacctacctacaggtatcatttgaagtgaattctttatgacggcattttcttgtgcatgtttttaaaaatctattgtgacagtctctatcttttccttggcatggttagatcatttacatttaatgtaattattaatgtttcaatttaggtctaacattttattgtttgtgccctctttttttcctttttcttccttcttttgggctatttttaacttgttttagtgttttgttttatttgttgtggtttttactatatctcttcatatagtttttctagtgactgttttagggattataatactttctttcacagtctaattagaatcactgttttacctttttaagtggaatatagaaatcttatgactatatagatccttttagctctcccattatgttataatatcatgcattatgtttacataaattgaaaatctcatttcatatgtcataatttttgcttttggctaataaacatatcttgaaaaacttgaggaaaatagcctgtaatagttttccatatacttacatttttcttactctgcctgcattcctgatgttccaagcttctttagagtaagtatatggataactataaccatcatttcccttttttctaaagaatttcctttagccattctaaagatcagatctactggcactgaattaccttagattttcctttttatcagcaaatgtctctaactctaacttcattcctgaaggattcttaaacatcggatatagaatcctgagttgtcaggtttttttctttctttcagcacttcaaaagtgctgttttacttcctctggactcagtagtttctgatgagaattccacattcaaatgactgttgccttgtacataatgcattgtttgtttctagtggctttcaagactttctctgaagctttcagcagtttgatcatgatttatctgggaatggatttctttgaatgtgtcctgtttgcagttttttgggcatcttaaatctacagttgtgtatcttttgccaaatttgacaaaattttagctatcgtttatttgaattttttcccgtactacactttttttcctctttttctgtaactccagtgacataaatagatctgttgaccttgtctcacgtgttctctttttgtctattttaaatacttttttttctgttgtttggatgattttttgttaacttggcttcagttttattgactcttttctcggcatctccattctactattgatcctatgcagtacagtttttaattttggttattgtatttttcaacactaaattttctactttattattcttgatagcttctatttgtgttttttcatttgtttcaagagtgtcttcccttgcagcatttttataacagatctcttaaactttttgtcagatgatttcaacttttgggtcatctcagccttggcatgagttgattttttccctggtgagtttatttttctgattatttgcatgcttggtaattttggattgtatcctggtcattttgaatattatgagactctgggttttatataaatcctacagataatgttgatatttttgttttaggaggtagtcaacctggttggatttagttagttcataagttctgaccagccttcaatatttgttcaattttcaaacccttttccgtcctcttaacatcagttcttttgtgcaccactcaccagccagtttgggaactggcagtgccgaattcttacagcagttctcaaagtctgtggtttagggtcagatacacatgtgcataggcggggaagtagacagctcacccgaacaggtgagtccagaaatctatcaacagctttttggtttgcttccatgaactccttttcctccacaatctttttggcactttttagttctcagggctccctcctcagtcccctggacagacagctggggcttttccccactccgctaaactcttcctattactaaacctcaatctgggtccaagcattaggaagacagaggtaaagagcaaagacatttcgcccacctcttagggggagcacacctcttcccatcagaaagggaccatctccccctcactggtttgggctcctgcggcccctgttgtcccccacaccacaggattgcttagggaggagctgacgttcaagggctcagagataacaccaaaaagggatgattcctcactcgccctgaacatagttgtctcagcccattttctgctgctataacaacactgccatctaggtaattgataaagaataggaatttattgggctcacagytctggaggctgagaagtccaagagcatgacgccggcatctgctgagggccaccccgtggtggaaggcattccatggcgaggaagcatgccagacaggagaaaaggggccagagtccctcagtaaccaattccagcagtaacagcattcatccattcctgagggaggggccctcatgacctaatcacatcttaacactgtcacagtggcagttgtttccaacacaggaacacattgaaaccttagcagcaggtgatgcttttccttcctcaaagtggattagagcccctagggggctccccagctgtgccaggctttgcctccagggctcaggctgtagtaagttcgggctgaggacaacagagggataacccaggaagcccattcatcttttccatggtacttgaaattcttatcttctttccaaggctgccaactactactgactcttctcagccctcacgtagctgctctgtgccttctgcccaggttttataaagacattcagtagaagaaacaagtatagagtgcttgcttcattttacctggaaccagaatccccctttccctccatttgtgtttcaggttagtttattctggctgcttttgatggccagggagcattaggtcaaatagctgtgacttgtgccagggacaccagctcctggggattccccttccaggccagtggctgctgcacagggatgtcctgcaggagctgaggacctgctctttcttgctctctgttgctctttgttggccatggccacagcacagctactgagatgctctgcaagcatgacccggcaggtagcacctgtgtgtatgggcctgagtatgcccctgctagctgcagcctggctaaggaaaagtcccaaagcctgggctgctgaaggatgccccttccccccaggaagccacacggaccttgacaggtcaccacccatggagctgtgatggttgagggaaaggagactcctcctcaagaacttggaagcacaatggcctgcctcccaggaaagagagcctcagtgcttgtcggagccctgatctcagagagggccagctgcctggccagctctgctgttgcctgtgctctgagcctggccgtgtgcagtggacgcacaggtgtgtttgctgaggtggctcgtagcagattatcaccgaggagagatggacacccaggataaggaagtgatgagtctgagcacagcggtggcagagccaggctggtcccggtctgtgtcctcctgccgtgctctggtgtgtgttgtcttccttattggagctgggtttggctgagttggtccaggttcaggtgtcaggcctgctcagagccttgagctccactccatggcgtggcatgaaaacacctcgcataaaaacccagtgtctgtgacacaaaacgatttctcccgtgaccagcatgagaaaagggcatccagacccttggcggaggatgcacaatgcaggcagagggtttagaaaacagtcttctctgggtgaggcagttatggtgcacacatttaaatagctgcccaagccgaaatgaaaatagccatgtccttcagatgcagagactccaagatgcaggtcctctcccttgaccccagccacagaagcccagcccaaggtacccagcaccacaggacaggcaggaggaagggcgagtktgggaaggagacaagggaagtggaggggtaagagaggaacatccagaatgtggcgttcggaggccgcgtcacagagccccaaggtctcggggctgccctctggggaggcccatggtgaaagagagaaggctgctggggttttttttgttttgttttttgttttttgagacggagtctcgctctgtcgcccaggctggagcgcagtggcacaatctcagatcactgcaacctctgcctcccgggttcaagtgattcttctgcctcaccctcccgagtagctgggactgcagacgagcaccaccacgcctggctaatttttttatttttagtagagatggggtttcaccatattggctaggatggtcttgaactcctgacctcgtgatccgcccgcctcggcctcccaaagtgctgggattacaggcgtgagccaccgcgcctggaccagaaggctgctgttttaatggttgcccctttgggccacctgaagtgattgttccagctgctgaggactgatgtggtcacctcaacctcaagaacttctattttccacawgagttaatgtctatgagtggatttcactccattatagaatatgatgcttaacagcaaggattgcccttcttcaagaacgggtgtcattcagccatgtgattctgcacaggctagggttcgaagcactgtgctctttgagagctgcttcaactaattactgcattcgttcgctgcagggtgaaacagagttttcagatacatttgtaaaatcaggtgcctgattgctaaatactacattgtttgagctatacttcctcatatgttgcctggtacggaccagttaagaaatggtttcccatgagaaactgacaatgaagctgaacatgtttgataaactctgtgctcatctatggacatataattgttttattatacgatacttttacacttggaaagaaaggtgctccgtaatttggcagcaatttgtcagagcagcactcaaggctggcgctcagatgaggcccttggaaccatgccattgtttctcggaactgctctgtgctccggttaggtttgcacacacctccctcgtttcattcctacaagtttagtaaagttccaggccgttctcccagaacacctaacggaaagcacagaaaacaaaaccaccaactctgtgttcgccgaggaaggcaggaaattggcctctgcttcttgcggtattgacgtgctgctttcattgtttcttttccaagacagctgtccccgaaatctctttacctccaagtcaacagcaggctaccttgctttgctttgcttttttttaaagttaggcataacaacaacagcaaccatgataatgattaacagtttgatttcaaaacgttttctgaagaaatgacagtaaacagtgcatttgcccagggaaatccaccaccccgccagccatcagccggtaatacaactgcatgtgctaatgaacccaaagctgttaatgtggtttcttcagttaaattgattcatgaattttgaagagaacattatctaatgaattttctttgaatagaaagcaattaaaaggacaaatcagtctgattaaccccaaagtcaccctcctgccacaaatggtgtacagtttgaaattatatcataaaaaactagagcacatttgctatctttttgccctctactaatccatgtaaattaatgaacaacaaagttaatttctttgatgacccttttctagtatcacctggattatgctgatgtttaatttgcttaatgttataataaagactaaacagatttttttcccagtgaagtgattatcgttcccttcagttaagaagtgatttttattatttaacacacatgtaagggtgtgtttcctttaagaaccaaatcacactttgccagcttggcaccaagtgtaattagtgttcttgtggacacactcagaacatcgttcctgcccgcggaagccttccctttgttgctgctattcagaaactcctgcccctggaggggctggagcccctgcgatggaggacatggctctgtctccagtgctcctgagctgcatgtcccccttggaaagacaataggtactgattcagacaggccttcttcgcgtgccccagtttctctcccaccgacaccactcccaggtaacagttctgaaacctggaggcagagggagagaatgttctcctgcagtcacctcctcattcctgcagcaggatgcggcacaaatgcagttggatgtggttagtcaattaaaatgggaatcaagtcattttatttttgcagccctattcactaaagatgcctgtaaccaaggtcaccgccagcccctgcgtactgtggtgcttggcactccgagcagtagctgggggaatcctgcacgcggctggaggtggacagccggcataatatcgcagcctggcctgtggctgcttttgccttctttgtcccagttgaagttggaaattaaccagcagtacaaaagatttccaagcaggcgggcaggcagggacttctgtgtgtattaattgagccatgagctcacttacacacgcccagtcgctagaagagtggcacacgcaaccccacgcggaacacgggaagatggaaagaaattgcaaacctgtggtgccagctccaaggatgccttccaaggggccagcctgcatggtggcctgccacatgcttgcgtctcctcgcctggtgacatggtggcagcagtgcatggaggccgtgttttaattgagtataatacctctatttgtgtagatgcgtttcctgttttgggactagtggctatttatatcagagctgctgaagccgtttgtccaaataacattatcctgcattcttcctttcagagtcgttcaccagacaggtgttatggaagctgctgaaggttgtgaaattcggagaagtgatttcttaccagcaattagcagccctggcaggcaaccccaaagccgcgcragcagtgggaggagcaatgagaggcaatcctgtgagttctcatggcgcaagcatggctgtgggtggygggtkcgtgcaggtggcagggtgtcatctgatcccacgtgtttcctcggaaggcaggctgtgctgctggggtgggcagaggggcgatatctgtgayggggaccattatrccagatgcctccagaagaggcaaggaggctacccmagcactacactcctggaagctcccccctaccgggagcacatmtccactgcatgagctcctggttgtcacagtgagcaggagrggagggagcctggaggagtggcaagcgggcagagggtgccccacctgctcactcaggaggtggacrtgttgggtgcctgttttatggcccacactcttctaggtgcccagagtacagcagctaacagacagaaaggtctacctgcgaggtgcctgcatcctagcaggatggccaagcaagggtgcacatccaaccccatctctctgtgggctgcactccccctgaggcccagggctccctgggtcccaagagctaaagcaccacacgtgagcacacgaggcaggaggccttgcagcatgggacaagggacctagaccacacgcacctcgtgtctcaccagggatggcgccctccccagagcccttctgtgtcctcgtccttcccatgcgtctgcagtcagatttcactaaactccaggctcccaggctatgcagcctcaggccatgctccccagaggacaaggcccaaccgggacacagcatgggtggggcagcgtggcctgtggtgcctgggggccacgtgggtgccgttgctctcccatctcacagcacccaggcctggcagctgggccgcgggccatctggcatctggcatgaggtggtaagtcacagcatgccatgtgcgcccggccaaggccacacgtgcctgtgtgtgtgggggcagaaagggtgccccgtctgcgtggcccattgggagaacccacacaacctcaagaatgcccctggaatattcacccagtgatggtgtgtggtcacgttggcagtgtcttctcccgaaagctctrtgaaagtttctagcatgatggaagcataccatctgatcagggagcacaaatatgatcactccatcatgggatgggaaattactaaatcagatagacctcactttttgaaaaattgctgtggctttactgtctatttccaaaactacttatatccctgctcacaggggagaggccggcgtgttcataccacagcctgctgctcctgctgcccgctgcagcagcctgggggcagagcctccgtttctaggagatgacagttacgtaggcttttgcacaaaactgcattgttagtccttaaaaagcaactctggtaggtttgtagtggattgcattgtcgtaatgtacaccctaatctaggcgagctttctaccctattaaaatatcccaaatatcccaggagtgagataccacagggacagccaccatccccacctcctccatctcttcctgtcctcagttttggtgacagtggctggtgggcgcaattggcccttccttttgcacctgttgcacattaattgcaatgtcttcagctacattgtcataaaacatctgcaccackcagtagggatctgatttttacrgcgcgttgggggatatttccgaatcaaatttctgaggatggtttttgacatttcccaataaaacttaacctacatgcccctctggaaggctgctgtcttctccccggttgtgagtcaattttgaggtgttcaacctgatgaaaaggcagctcagatgctgttgtgttgtggctccgtgtagggcccatgagaactgtggatgcgaatggggttttgggggtgctcttcctgcatcagtgcagtgactgtttcaggcagtgtctactctttgtgccccccgaggagagtaagtccttgtcttctccccactgaggtggattctgctccctccgtgcacacacatgaagatgggagtggccccgtcagcgggcgccgactgctcgctcccttgtgtgtgcagctccccttttgctgtaaggacaagctccactaactgacatgtgcagcgtggcagcaccctcccccaccagcctttsgtgatgccagcagtttctcactctgcagtggagatgccgtcgctggttagcaatcctgcttgtggcgatattcggagacatttattgttctgcaaaccagcgtgactctcttctcctgctattaatctctatgagtgtctctgttccagtatggcctcagtcactgaaatgtataaagtagtatcacatgggatgtaaaaccctaatgtctgtaaagtccacacatcggcaccctgtcccatggcaaagccaagactggaggtgagcacagcatcaggcaggagggttctacaggcaccaagtctcgcccttctcggcgtccacatgcctcctgtgccgagggcagccaggcggtggtggcttctcgtggcctttctgtgggctccaccgtgtgcagtgaccttcagcctgaggagggggctgcagcaggacctgtggctacggtacccacagacgcctcaaattatagcacagatatgccagagatattcctgcaagaagccttcagctacgtagtttactatggttcaggttgacagcctcccaagttcccattagaaacctcattagaatgggctaggaggatgaaaaggtgacccagggacttgctagaggaagggcgctggccagcagtgagccattgctgctgtcagtgtcctcaggaatgtttccctttggcgctgacagcagtgtcccagccggaaggctgcgcacatccactccagcccagacggtgcgtckctgagactcgctcattgaaaacatcccttatattcaggatgaatagagtgattgtgcatttaagggaggagagtgaaaaatggacttggaatgttagaaaacatcgtaaagctcattgtgcattaattccttaggtggcttgcaataaacaggagcacgtgctggttcatattactgcatttgctgtcggcatgagtttctcttccccaaccggagtaagggatggcttttgccatgcggagctttcctctatcctaggagcttgatttctccagaatcctccaggaaggactcaccagccggtgtaaggtggttggtcagcattcctggaaggctgtctccccaactcagcgggagaggatggtcagtttcccagtatattgagtagaaaactcctcacgacccaccccctccacaaagcacccttcctcttcatcctcagacagaatttgctaaatgcagttcaaaggcaatcgatacattgcacagagagtctccccacctttttctraacaaatgcattcctgaggagttagtttattcacggattgccatgagcgttaatgaccccccgaggcttgttctgcccgtcacccggatggctgctgataaagacttagcatcatgttctaagtgtcaaggttgtcagtggagctgaaccatttgaccagaagaaaaaaacgcacagggagctattgattacagcttctcggtgtcacttgttcaccaggatttaggtattgatgaggctgcgagtgaaaacaagctctttcccttgtgggctgctgcccagaagaacaaaggcgaagttggaaaaaatattcagccggtaccagaatcagagggattccatcattgactgaaaggccccttcatgttatttttgttggaaacaaatctatgggtttggaagttttatagcgtttgagaaaggggctgcataagtgatggattcacgtattggatgaattagatttcacagcatgaagatttcaatgcagctgtgatattatgagcttcttggttattgataaaaattacattttatgcagcacatgctttaaaggagagggcatagagggtacagatcctttgaaaatgtccttagggccccaataaatttcagcaggtttcattatcttaatagtctgaaacctgccaccaaaattcacacaaacagaagcagcgttccctatttctaacggtaaaaatagtgcctatttggtaagtcacctcttccccatcacagcatgctaaggtgaggaccggtcacagctgtcggggtcattgttattccgtgccatctgtcctggcctctgcattgatgtacaggaagagggagagggagacatgtttattttactcatttttataatttcatagctcattgagagggagagaagaaaaaccaaagctctgctgtgaaatctgctattaggtaggaaaattgaattggtgcctaaatgtttataaaactagattgaattaaatgcctacctctttatcagtcaaaaacgtgaattgtgtattatctaataatgccctcacagcaattattaatgggactgttgtatttgataaaaatcatcaatcagggtaaatattccatcctggagatttcctgtgactccttctggaagactgggattctcagctgttccagaacttggcagttactacacctcactctagtaaactcaatgttaaaaacagtcagccctccgccacctgcatgttcccatgtcatagtcgtcagaagcctcttagactgcgtcattggtgcacgttaccaaactcatcrtcaaattaggatgagctgtgtgatgtgccggaagccagagtcccaccttgcagccatgtcatctgctggcaccggctgtcaccccacaaggtcccacctcaacagtccacgtcaaggaggagaagtgtggtgcgtggagccatgcaggagagtggttagagccccttctttgccacttaacagctttatgaacttgggcacgagactccattcggccggaggctgagacaggcctggtggggccttgcggggtgatgggggccatagatggggtcgaagatgcagcagcatcaggcatgggcacacccgctcccaggggctttaagcaccttttccaaggggggctggggcttcccccacctccctcggggacgtgtgtagctgggccccacagagggccacacccaccaggtgaaatctgtggcaggtacatgtgtggcagtgacacaagctgcctgcaccaaaagcctcaggggatgcaaaagtagcartcacctccccaggaagcagaggtgcccaagaaatagagcttggagatgctgggcacacgcccccagctgcttcctctaaaagctcacctgaccagtagctggttgctttgtccagttcactggctttggagggtggagcgtggggaagctgggcatgggcagaaatcatttctctgttgagctggggataygctcagctggagagaaaaagaagagtggagtcggagtgatacccgggggtacccggaktgatacccggaggtagcctggacacgccccaaccttgggatcctgcagaaacagctgtttgttctcatcagggcaggatgctgggagcagggcagccatgtgtgagggcccagggagaggccccrggtctgcagcatccgtgtctgggccatctaggktgcggggatgaatgtgctgccctccagctcaggaggaagggaggaaggggggccaggcagtaagcgatcgttaggcatctcccatgtgccttctacgtgtcgtgccagctgagaaccttccagagcgagcttggtgcccttccccattcttctggagcctgccctggctcctgtggtcatgctcattggcagtttaccttcttcacggagcagccactgtgatgctttgcacgatgatgaggcatgtccccccacacgtcccccgagatgtcctggccccttagtggctgcccacccatacacctgctccccaggcgccaggagctacttagggatgaaggctgttgcctgggaggctctccagccaattctttctttagaaatctgtgcaagacttccccacatgctcctgggaagccattctggagcagatcttcacagtaactgcttgttgggaagcttaagcaaatggccctggagcccccagagcccccagagtcccctgcggtggccatgcaggctgtgtggccatccctgtctgcccaggcagagggggacaaccagagagatgcccatatgttactgccttgtctttcacctttctgagccagctgagaaatggatagcagacctcaagattttagctttattagggtaaaagcgagattgaaggcagggggtggggggccagtggcatggccatggtggcttcccagtaattcccacaagaattacattcgccatcactgtcccctctggctaagctctggcctccccagccaaggcaggggctgaccatctcagaagagatcagggcgccccgaaccctggggcaggcaggtcacctgcaggagccctaacagtgctaagctgggcatacccctctcttcctcccttgtcggtggtcagtgactcattctcccttgtgggtgtgagagtggaggaggccagcacctacatggaaaccagaggcaggggccacagcayctgcccccacccaccacaggtggctctcagagcttcagccagacagtggacccatggagctcctcctgtctacacagctcgggcaacgccaaaggaccaaagcagagtctccctgaggactgcactgaaggaggcgcccgcccctctggagggaacagggattcccttcccctggtgggactggccataaagaagcagttggtaggcaggatccggggcctgtgtatggctgcgtggttgtggtcctcactctggatcagcccctatcagcacagggcatcctgaggcaggggttggccaagtcctcctgtcaagggccagagagtaaatatgttaggcttggcaaagcagccacagccagtatggagaaaaaggcatggctgcgttccagtaaagcttcatttgcaaaagcaggtggtgggctgcgtgcgcccacrgccacagttggccggccatgggctggagaggcccgtgcaggtacggtcttctctgatgcgtcctgtgatgcctgcgtggtacctggggagtgtttgagagcgtcacataccaccagaactcggaaacgtagttttcagttttgtaagcgaacgttgtatattactcaccggatgaaattaagttttctcctcccaaatcgtgggcctaaagcaattctctgaggatgccccacgtcacctcaggacactcgtccctcccccaacccgtgctgagacccccagggactcaagggcctcaggggaggggaagtccatgctgagacatagctgacacccacccatgccaacagcctgcccctggcacaggcccctgcttgktgggcacaggactcctgtcagtcagggccttggccttgaccccaragacctcgttgtccagatccctgactgacagtggctgcccccctgtcttccaggtccccatcctcrtcccgtgccacagagtggtctgcagcagcggagccgtgggcaactactccrgaggactggcygtgaaggawtggcttctggcccatgaaggccaccggttggggargccaggcttgggagggagctcaggtctggcaggggcctggctcaagggagcgggagcwacctcgggctccccgcctgctggccgaaactgagtatgtgcagtaggatggatgtttgagcgacacacacgtgtaacactgcatcggatgcggggcgtggaggcaccgctgtattaaaggaagtggcagtgtcctgggaacaagcgtgtctgccctttctgtttccatattttacagcaggatgagttcagacgcccgcggtcctgcacacatttgtttccttctctaacgctgcccttgctctatttttcatgtccattaaaacaggccaagtgagtgtggaaggcctggctcatgttgggccacagcccaggatggggcagtctggcaccctcaggccacagacggctgccatagccgctgtccagggccagctaaggcccatcccaggccgtccacactagaaagctggccctgccccatccccaccatgcctcccttcctggctgtgtccatggctgtgatggcattctccactcagcagttcctagcatcccacacccaggtctcactgaaagaaaggggaacaggccatggcagtcagtgcttacagaggttttctagctttgtttcctacctgccaaaaaggctaatgcaagatgcatccacttatggtctgtatcaggtgaatagaaaataaccatttgccaagatttggaaagacagagagctctctggacacgggttcgatggagcttgcacctctctgagagctgaagtcaagtctcaccctctctccatactccctggcctagtgtgctctgggcagcaggtaggaagggacagggacctctcatctcaagggctgccccaaagggccctcagggaccatgggcctgttaggaccccagcaccccagtgtcgatcctggaagtcaaaggtcacgactgtggggggccagctcatgtcactgatggcagcaggcagggtttccagcatgggcggtgcgctgctgtctgatacttcattattgtgttgtcatcctagctgtataattaactatatccaaaagccggaagggaaacctgtagctctgcatatggagaaataaaacagagcatatgatgtatagagaaaatgaactgcacccagctgtgcactagagcgccatgttcttacccagcattccttgccacggtgtgaaccacagcagggaagctcgcatggttctacacgtcaccgaggcctggatgaaaatgtggcctcacgatgtgtatggttgggacccgccttctatttcattttatcttaacaccaacgaaagaaaaccgatttcagacgtttttcgctgatttatgatttattatatccctttctggcatcagccaaaatctcggtttttcctatgacatgaagtgatgtgactcttaccccgttgtcttaactcttggtatttttgaagcaggataagtcacacagcgggtcacgtagacacgtgctgttttgtgggacaggccctgggcctccttgctcctggcaggcctcaggtgccgcacgccgcgtcaccgtcaggactcgcaggctgtctggtcatttttgacgttgctgaaggtgagtgggaaaagctgggtgcactctgccccaaaggtggtgccctgtgtcccccacagatgatggccctccccagtgatggccggtcaccaggcacggctttcccctctgcatgaacagaacagaagcttctggctctccaaggcagcagcttggggcctggtggcccgggtgtgcgagccgcgagtgctttccaacagagggcaccagagccgtgcggtgtgctgtggagaccccagcaccacttcccctgctggaggatggatttgaaggagggtggctgggcggcaccccgatggctccctgtgctccctgagaccctacaggccgccctctgcagccacacctggaccggcaggcatgcacgctgcaggcaggctgcctccgctgtttgggtcccatgaacgatggaagcctcccagtgagatcttcaggtctctcatcaggcacaggctctgagggagggtcctggggccacatgactgcagccagcgagggccgagcccccagaatccaggtcagctcctggtggcaggggacctgcccgtcaaagccgtccaaggtgagccagcaaatccgtgtggcctgggagcacaggtgggcctgctcggaccatgcccttggtgcagtacaaaaccatgttctgcttcctctccgagggtttccgcggccctgtcagaacaggcttgatagatgcccggaggttccctctgacagccgcagcagcagggctcaaaccggcggggccgtgtaccgctccaaggacaagytctgccgaggccgacatgaaaagccagcacgcgggtcgcctagagccgctctgcctccaagctgcagcgccgttcgtgaaaatacagagggagagggaaggcacaaagaaatacaaaactattttccaaataaaaagaaatgtcgaaacaagaaagctgtgttcttcagccttggccctgggtccccctcaccctgtcgcatttcccagcactgtgatgctttgaaggccgacaccgagacccgccgtgcacgacagccacctcgcagccactcagaccggcggaccacgctcccctgtttccagagagatgagagagtcagaagtaatacttgtttttgcagaaccacacttgtggcaaaataagttgcctttggccacgcaggagactgagttttgtgaggggttgtccttctcccagtctctcttcccgctgggaacagaagtgtccagtaaacccacctgcattccacgtgtcctgtggccgcctccagtggtgagtctgtgaggccagagaagagaagctatgaccgtgcaaacatgcatgttatggtgttggctgatgcggaatcaggaagcttggaggagctcttgcatgaggaattgcagaacttaggggcatgaatttgcacttccagatgtgaaggttgcaggcaccgggcgttgcagaggaagtgggcaagctcaccttgtagagaacttacttggggtttgtaatttgtatacacttcttacccagcagaaacagcttactgaacacccctcgggtggctggatgatgtgctagcaactgaaaccatctctgcgacttaagcttctctggtgcgtcgcgccccacrtgcttctccagaatcccgtttggaggggccaagcaagtccaatatagataggtttatactgaagccatcagttttgtttcttacatcgtttgtaaacagcagtattatcctggaacttgtttcctacagaactgtaagataaggataaaatcccatccacctgaattgctgagaaacgtaagaggtggtgtgacccgctggagccctgtggagtggcggactctggggagtagctggtcagtgagattctcgcagcaatgtgaggcatcctcctcacagaaatgcatttacggatgttgctgtatcccctgacctggcctacaaggacagaacagccctgggggccacgtcccctcccggtctcatctgccgcttgctcaccttggctgtccatgcacccgtagctgtgaccatgggcggtggcgccagctcggacttcaccccgttggagcgggcaggatgtcacactgagctaatgtgagattgttcatgaagctacagatcttagtgctacttgggcttctcacagcacagaggaggattctgaagtgagagataaattggcttcatgtatgagcaagggggaaagtgttttattttactaggaagattttactgaaagaccaatcccgaaacggcccttgcttcggccacagctgctgggatgtcctcgggcctcccctgtttgtctgcatgtcttcttgttgccatcggggcagtggagtccccggaaacagtccaaggccctggggtgggggatttaaattttttggcttccctcagacctcagaccgtgtgggtttttttttctttctttctttcctgttcatgggcatttgattaaaagtttgtgtttaaagagctgaacttcacatcagttttacttatcagtttgaaagacattgagatctaaacacggctctgcccaagacctctgccaagcagcgccgtctgtctgtctgtctgtctgaagggacgggaaggtggagaaactgcaggtactgacctgtctctaagccactgagggcagccatccagtgtcctcgggaccccatggctccagctgctgacagatgtgaaacgtctggcctccatcacccgggtcgccccgacaaggatctgtaatgggggcaggggtgggggtggatgagaaagtaggaagtggatgctgggcagcgaggtgtgaactgacggcagagcccagcccgacagcacctttgattgatgaaaggacattgttaacaagcctttaaagtttctcattaatgtttttttcgttggaaaaaaaagccaccagaaaaaaattccacatggacagtaattaagatcgatcccgtacagtatggtatcaatgtttgggagcctttaggaaaaaattatccaccctcctattaaagacttattttcaagctgccattttccaggctgttgaaagtccctggcagtgtgggtacctgggcagtcaggcacgttccgcagatgtgatgtggtcggcctcacaggtaatgtttctactgtggcctgaggatggagagtggagcccctgagctttagttgtcacggactctgatgcagtcaggcaaggaagggtggggaaggatctgatggatctgctgccatggagaagctggagttcttctcagctccgagtgagccccaaggagtgcgtctgagcagagtgcacgtggtgcccatggttctcaccagagatgctcaagcccttgggcgagggggctgagccagccccgacattgtacacacagcaccacacacgggcatacccaacggttctttacaggtcttcgagttacacgtcactgctgtttggatcccaaacaccagcggaacgcatgattccaggttgatttgttgactcacattaaggaaacccagctggagaaagtatcagggtcctaacgttaagcaacctgcgatattatgcaaaaaggattgcttttgtgtgttgtgattgccatggctacgagaagaaatggatgcacgtgtgagacttggctggtgacaaggaagcatgtatggacatggaatcaggtcctgagcaagcaggcggtcctccaaggcggtggaattggccctggatccctgcccaaaggccgctccgctctgggccttggtgggaaagctctgccctctaggctggcctctgagagggctttggtgtgaccttcctgtcactgcccactttctaaccagacaaggagggtgtctgtacctggcgctaacccagggtttgggggaccgtcctgcagtccccgtcggacagagaaggcttcgtttctcaggagctccaggctttgattcactcccacgatgtgtttctttttggggtaaaacagtccccacggggagttaaattttaggaagccatgagatccttccagatgaaaggcatcatgtaagtgtatgatactgttactgagcaaaagccccagtgctcccaggtgtggcaacgagacacctgcactcaccgggcaccacccagccggggygggcgctccccgggactggcaggttctctaggtgtggcagtgagacatcactcaccgggcaccacccagccggagtgggtgctctccgggactggcaggttctccaggtgcctccttcctcttgcagctttgctcactttgtcaattttcaggaaggggaattttaaatgtccccccagtcctgaagagattgagcagcattttcaggaggaggcctcaccatcatcattgccacactggccataaaccagagactctgctggagaaaccctctgcagaccttggaggcctcacacatcccagttacgggcagcgcagctgtcccctccggagaagattcctctgcaatgggaaagcatttgtgaaatgaggcagggtttacataattggtgtgagcctgagcacacccggcacacctgtgtcctctgcgtacacctgcctgggtgccgacactgcttgcaggtggttttggggaaagtgcaggcctggcttccatatggcacatagtggcttttctaagactgttcacatgtctgccaatgaggaatggccctggcccctatttcctgtagattcccaacaccactggagggcccgtgaggatccttctgtccctgcaaggtgtggcctactggggtgtccctccaaggtgtggcctgctggggtgtccctccaaggtgtggcctgctggggtgtccctccaaggtgtggcctgctggggtgtccctccaaggtgtggcctgctggggtgtccctgcaaggcgtggcctgctggggtgtccctgcaaggcgtggcctgctggggtgtccctccaaggcgtggcctgctggggtgtccctccaaggcgtggcctgctggggtgtccctccaaggtgtggcctgctggggtgtccctccaaggtgtggcctgctggggtgtccctccaaggtgtggcctgctggggcgggtcctgccaagtcttcatctccatcaccactcagcagggtgtagcctgatgtgggaggcgcccaggaggcgaagcagagacatcctgcctttctttgaaagccaccccagtgaccaagaggtaacttgaaatcatgggcacaaacacccataaatcatcatcacagctaagccggcccccagccccctcccaaggggtcttctgctggcaccaccaccaccaccacccagaaggagaggtgggttgccgagtggtctgctttggcctggcttcaccagggatggaagatacttgcaaggtccagagccgtggctgaccctggaactggsagggaggggagctgttttgcagttgtcaaacccagtatctgccatgtgacgctccctgccccacactttgcaattcaaacctcatctgggcaggcatccctgaaatgcacctttcccag

SEQ ID NO: 95890 - DNA, 38266 bp, Homo sapiens
atgattggcgtgggaatttattcccctgggtgattttttggggaggcctctgtgatgagaaaagtggctgtttgtgaacgagacccaataaacctccccatcccagagtttgcaaagcattttcacttacgtccccatctacactgatctgcgactgtggggattattttttttttttctacagatggatagtgaatggcagaaagagaccccaggagaaacagactcctggttgtgggaggctctgatataccccgtagctgcctcgaggttacactgtgctagaattaaaagctgtaaatctaaaggagactagactggcactatcagtgtccctgagctgtactggggtaaagccagccaagcacaggaggaacctggccccaggctcctcgtgaatgctttgaaagagaatcacatccaaggtactgcgaatggatgtttacagaccctcctctgagacaaccccagggcagcaggaaacaaaaccttctcaaatacgctcctactcagggacaagaataaaatgtcctttatgcttctcacagggttctgatgctttccagaccagaccacgttagatgaacccaggggaatgtttcccattggtgtccttctaagaaggaagaaggaggaaggcaagaagtacttactgagttcctccaaggctcaaacaaaatatgcatttgtttgcagcttcctactcgaagcagtttacatttctgtgagctgggaatggcaggggtctggtcattaggttaatgctggcatgtgactgctgtttaatcttctcaccccattcaagtttcaacgatttacctgttggggttcagaaaccaacacccctaaaatatgaagctttgtgaagaagtctcaaggtctctctggcctcccctctccctcgtgtctctccattctttgtctgtctcataagcacaggatgaggttgttctctgacattcccttacctgcctacatccagacctaccaaagaaaaagacctctggtcccttccctgagtgttcattaattgtacccatatcacaggaagaaagactaaagtctgttaacacagctggacagacttttgtcacaaaccaatgtctgctctgtgggctcaacagactttgtcccagctcactgtatgttctttaagcccattgaatttccctaaaaataatttactagtcccctaaaatcatccacacttccccatctctctttcccctaagatgaagaggatacaaccacctgtaccccattgagatagcggacaatcactctgtgatttttcccctatgcatgctaataaatgtgtaagccattttccctattaatctgccttttgtcagtagattgtttagagaaccttcagagtgcaaaggggaagttttcttgacccctaaagtcccgaagacatcctttatagcaaagcatctagttcagaatcgagtagtccatgtagttgtcatggttagcttttagcatttcttttttttatttgtttatgtgtgtgtgttttcaagttttatgttataattttgatggagctatttgttcaatatccagggtctaatctaattgctaggtaaatataaatatgcccagacatattgatcttgaatatacataacaaatgtaaatttttgtgtgtttaaatgatgacaatttgtattatatttgtcaacggttccagctttttgtccttataaatttaatacgacatttaccttggccagatttctataaactactacaatactgaaatatagaaatcaaggaatgaatacaattctgtatcaccctacattggcatggtattgattaattacggttttgtgcagacacttttcaccagtgatctcatcgattcaaaaggcttgcagaatattgcctgttttgttttttcctttccagaagcccgttcctaagtccagcttggattcctgtttgtgcagactgctctgcttacatcctgggcagctctgatgctacactgaatgccagccaaagtcggtgcccgctcacgttcacagagaacaggcaagtgccttgcttgaggtctccccaccagtaaactttccagtaggggtttcagccagggtagtctgattccagaacccaagcacagtgcccctttgcattttctcagactatgaagcttttacaaaagtagatgtggaaagggtcatcatgcttcccaaaggttcagttctgcaggcagcctccacccacttgttgtggtcatgtggcatgggtctggagtccggctctactgtttcctggctgggtgacctcaggtaarttatgtaacctctccaagcctcagtgtactcctctggaaaatgggaacattaacaattccttctgtataactttgttgtaaggctttaaggagacaagtggcgtgaggtgcttacaatgtctgacacgtgtaaactctcaatattttaatagtcataattaatagaggtaaactgcaaaaatgcacaaatccttatttctaatgtttctatacatctctacagaaaaagaaaaggaagcaaggaaggaaggaaagatctttttgatgtggatccagaacccttggctcactgtggactttgacattatgcctgacgttgaggcagcagccaaattccacaatgagacataagcactcttacacattaacaaaaatgagtgcctagaatcagctttcatgctcccaatatactcactcgtgaattgggattggcggcccccaagcccacactgccgcacyttacaccctcggaagagcccgtagtaaatgtccccaatgaacttgaccagctctctgtctgtggcgttgaccagatccactccagtctgacaaaggattttcccactcagccagtggggcactaccagggcaacgatgatcaggatgaaggaggagaagctgagtaaagacgccagcccataccacgcctttttgaaccatccaggcatgctagtgggtgcaggtcatccccaaggtctccgagcagcagcgagggtcattgacatctttcagatactcggcaatgctctgctccaaggtcagctcttccaaacactctgtttcaagattgtaggtccatcctctcgtcctccttcagcgcaagcttgcacagtccatgcttcctacaaccacatccagaagcctctacagagacaatcttcacctgactatgtagcggagtgtgttactgaaggaagtaaccttatatctcctcctagactaatgtttcagcagactgtttaactgttcctcgtttcaagtatttaaatagccctggtgtggacctcgtaatgataaaggagttagtaataagcaaaatcaggtagctctgaagattaagagacgcaaaccaatctcaaaaaatgcatgtgttagaaggaaaacaaaaacagaatgattagcacttgaatattgccaacaatgcgcagtatcaaatgtcgatctcgctgatgcatgggtgccctggcatttctttctctgaaatgtcactgctgtcagaatctttaggactgttattaataccatcaaatgaccccggttcttggggctttaatattgaaatgtgtaaatagggccttatgaatttctcactgtgtgaatctgctgggggtaaactgtgactagaattactttgtggctgttggggtagcctggaatccaacacttaacattgctctcacccgtccctccttctacgttatctgaaatgggagagaaaagtgtttttctagtgtattagcaaatagtagccacactgctggggtattcatctcttctaatagtggaagatctaggctttccttttaatctgtagatactaggaatgaaatattctttcctttctatcttatactgtggactttgacattttgacttttaccttattcctgaatatcaacttaacatcatgtgagactggcaacagtcactctatccatatctctggggagcaaagttgggcaaaagtggagcagtaaaatttcttagttggtcacagaagcctgaaggggggttcaggaagttgcactgttaaccaataggggtcccaggaatctcacttggagagtgtcaaggaagcagagggacacattaatggaaatgtcagtttccttcctcgcaactggggctcacttcagtggccactccacaatgaaaataaaaatgagaatttctgagcctgggcaatgtagtgagaccttatctctacaaaaaataaaaaaaaaaaatagttgggcctgatggcgtgtatttgtagtcccagctactggaggctgaggctggaagactgctccagcccaggagctcaaggctgtagtgagctatgatcatgccactctgagtaacagagtgagatcctgtctcttactatatatacagatgagtggcactttaccatgtacaaaatgcaaaatgctttgaccatatgcttgctcacctctgatgctccagcaaccctttaaggtaaacaggagatgcacgatttcagccatttctctcatgaaaaactggatgtcagtgctggggctgaaattcaggtctttgaattacaacagctcatcttcatcccagtgactttgaaacagcaaatgtttttctggtaaaaaataacagaatacatataaaaggctcagaagactgcttggcacattaagtgatcaataatgttagttcacgttcttattttaacattaagcatgctttgacaagtcaggacttgcgtaaatatcattgagtcatatttctgccgtcagtgagggacctgtgtcaacttttggtgttttgagggttaagcaattgttttcagaaaaactctaagggaaacacttgattcccaacaagcctttgtcttgctgaacaaaggtgtggttaagtggaactctagctattgaagacctgtgttcaaattcccactcttccagacaagtgtctgtgactctcatgcctcagctttctaatctgcataggattatcgtgtggagtaaagtgaaatagcacaggcagatcacttagcgcagtgccttggatataaggagcactaaatagatggtgctctcctctccatccagcctcctagcagttctatttctgataatgaagcttctgacaacaaaatgtgctgctggctgcatcctcttctctagtgacatatttctgcatgctttacctggcacaagtttactgaacaaacatctgtgtctgctgtgtacaaggttatatgtggatgggaagtgacacaaagatgtatgtaatacagggttctgctatcaagaaggttatgagagtgttagagctctggttctctatcagtgatgaatttgcccctaggagacaactgttaaatctggagatatttttgattcttatgagtgaggggtaggggtttgctattgatttctagtatatgcaggccagggatgctgtaaatatcctacagtacccagggcagcacctgtcacaaataattatctggcccaaaatgtcagtagtgctgtagatgagaggctctgtgttaaagatacaggccatgggcagaaataactaatatacaagggagaaaatgccaggatctgtgtctggcgatgggtggcatgtagtaaaagggccatttggattaatgggtataaatttacggttagatagaagaaataagacctagtgtggtttgtctcgtctcggcagtggactttcagctccttgagcgtagcgacctcttctgtttttttggcaggtgggaatacttaaatctctattttgatgcacaattaaaaataaaaaattgccaaaacagtggtcgaaaattgtactatactatattttacatgcttacacttcacaaattaatgctcgtaaaacacccgctctccaccctcctcgcccttagcccggctcgctgcacgccccgaggcccagcacttgctggcgggtgggaggaggggcttcgccgatgtccccgtcccaggggcagggcctggccgaagttacagtccctccgggtggcggggcgccccgagcgtggcagcgcgctaggcggcagcagcgggcgcggagcggggcgcggccgccgcgcgttccctcttggyggggttggccggccggggcggggcgcggcgctcsggctcgaggcattcggagctgcgggagccgggctggcaggagcaggatggcggcggcggcggctgcaggcgaggcgcgccgggtgcyggtgtacskcgrcaggggcgctctgggttctcgatgcgtgcaggcttttcgggcycgcaactgggtaatgctgcgggctggggctgctgggtctccgcgggggtggccgggggctttcgtgtggaacccggcggggggcagtctagaggaaggtgggggcccctgtgcaccccctgacycgtgttgcttgcacgtgcgcgcacaggtctacgcgtctattcctgtttccgagtgcgtgcgcacgccagtcccagggcgctgggcctttgctgtgcaaggaggtgctccgtgggcctccgccagacccaaaaagtccggcgtgactcgggagagaattccaaaggggaggaacgggagcaggggtgagaggacggagagagagtgtagaaggaaggctctagaatgagacagcccagtcccggttactagtcatgagaccgcgtattgattacctaacgccgtaggacctcggtttccccatttgtacaacggagattctgacagtgagagttgggacgattagatgagataattggtgtcgttgcacataaattacctgacgcctggtaaaaactgtttaaatgctgtctattaatgttactattactacccacccctgttcttttagccccattggatctgacagtttgaaggctcagcacggaaaaacrctgacggcttctttgctctgcaaagactatttcaactactttgcatagtcaggtgtcaatttccaggaggcggcaagtcggagcagagctgatacwtggccaaagacccttgacctcagccgctcagcaggcctcagcaatttcccggtggagacactgccagcggcagcgttctgggagcttagttagcagcagcagcacagcagcctgggcaagagttcccctgggaccagaaaaaggctttcaggattttctttaaaaaaaaactatctaatttttatagatgaagggggcaaaagtacagtttagttacatggatatgttgtgtagtggtgaagtctgggcttttagtgtaaccatcacccaaatagtgtacatttaccaaggttttcttgttgctcagaatctggtacaggaatatgcttctgaagaattcagtcacaccactcccttcctgccacccatctgctcagtgcttggggacactgatgagggcgctttcccaggtcttcagagatgcatggtggtgacagaggcagcacttctgccaagggccaggcactgtgttcccagtaccagagttcccatagactcttaatgcccccaatatctttaaggcagtagatcctgttagcgtcatgtgttagagggtgaaggctgtgctttctcctggtggtggcactttggtttaccttggtcttggcagaatctggagagctgatttacctctggctcttggtctttcccctccgagcttcttcctgccatcttagggagggctaggatgatggagacttttcattgtttcagtatcccccrtgggataacaagttaattaataatataacaaatgttgatgaatagatgctgtgtttacagcttaaggtagagataattatctctggggacttcagaccaagagaccctgagtaaggactgaacatcccctgtgccaggagctttagcatcttccatttcatttaattcttacactgaccctgttaatcatcaacaaamaacctcttttgttgggaacctctgcccrgcatcggagtgagaaagccactctggcagagctgggattcaaacctgatctgtctgatttccaatcctaaagtccatccctctctgctgcaggacagggatcctttgtgarctgaatctggtctgccacctgtttttgtacagcccaagagttaagaatagttttacattttcaggtggttgaaaagaaaatcaaatgaagaattatattttgttgtatatgaaaattaatgaaattcacatttcagctctgaagatttattggaacacagctgcacttattttttycccctatttattgctgtgttctgttacaattgcagattwgagtaacaacagataccatatggccagcaaagcctaaggtaattgtgatctggccctttacagaaaatttgctggcccttgatgtctctagaagtgcagggtttgtgttttagaggtgaatgtggaggcggagtagagtgtttggaggtaggagggcctgggatggagcccaatatagggtgtgttttcattgaagcctcttacctgtctccactctgctcctttatttttctttctttttctttttcttttatttaaatggagataaggcctccttctgttgcctagcccggagtacagtggtgcgatcatagctcactgagctcaagtgatcctctcgcctcaacctcccrggtagctggggctacaggcatgtgccaccacacctgactaattttaaaatttttttgtagggactgggtcttgctatgttgcccaggctggtctcaaactcttggcctcaagagrtcctcccacattggctcccaaagtgctggcattacagacgtgaaccactacacctggccaactcccctcatttctatgtgtgactctttcatggaataacaactcactgcctcttaaccaaagctgttttctccttccagygggttgccagcgttgatgtggtggagaatgaagaggccagcgctagcatcattgttaaaatgacagactcgttcactgagcaggctgaccrggtagtttcaaaaaggcccccaaacattgtgaggggaaccctggggagaggtgaccactggctgtatgttcttcctttggctgtatgttcttccttttatttctttttttccccgagacggagtcttgctctgtcgcccaggctggagtgcagtggcatgatctccgttcactgcaacctttgcctcytgggttgaagcaattctcctgcctcagcctcctgagtagctgggattacaggtgcctgccaccacccccagctaattttttgtattttcagtagagacggggtttcaccatgttggccaggctgatcttgaactcctgaccttgtgatccgcccgccttagcctcccaaagtgctcggattacaggcatgagccaccgcgcctggcctgttcttccttttttttaaagctgttgtttctctaactaggaaagccatttgtgttcattgaggaaaatttggaaaaagtgaaaaatgatacaaagataaattatataatcattttgagttagttcactgttaacattttggcctattttcttgtctttttctatgcatattgtatgttactccttttacaagtttaggtaattttgtattttatagtttatggtaagctttgtttttttttttttttatacttaaataattctccagrttactgaaaaaacctctttgtagatgtgtgatattccattttatggaatggccacaatttatttagtttgtttattgtacatttgagttttttgcaggatttttgttttactattgtcaagaatgttgtgatgaacgtctttgtctacatatctgattattattgttttttgttttaagagagtcttgctctactgttgacactggagtgcagtggcacaatctcagctcactgccacctctgcctcccggattcaaacaattcttgtgcctcagtctcctgagtagctgggattacaggcatgcaccccaatgcccagctaacttttttgtatttttagtagagacaggtttttgccatgttggccaggctggtctcgaacttctgacctcaagttatccacccaccttggcctcccaragtaatgggattataggmatgagccactgcacctggcccacatatctgattatttaggatacattctaaaaagtggagttacccagttcacagcaggaacactaacaaaacaggttatttttaattataaaatgatatgcatattataaaacaaaagtccaacaaaactacgtaaatatagaaataaactgtgaaactgtcccttttctccccatcatagtatcatttcccagaaggatgcactattaacagtttgatggatatcctggtataaatatcttagatgctctaggctgggtgcagtggctgacacctgtaatcccagcactttggaaggctgagatgggcggatcacgaggtcaggagatcaagaccatcctggccaacatggtgaaaccccgtctctactaaaaatacaaaaattagctgagcgtggtggtgcacgcctgtagtcccagctactcgggaggctgaggcaggagaatcacttgaacctgggaggcagaggttgcagtgagccaagattgtgccactgcactccatcctgggtgacagagtgagactctgtctcaaaacaaaaaaaaaaaaaagaaagaaaaatctttgatgctcttaagcagtgcttaactttcttgagaagcccttctggtgagctgcctggatgacttttgagtcaggttctcactgtgttgcccaggctggactggaactcctgggctcaaaggatccttctgcttcattctcccgaatagctgggacttcctgagtagccactgtgcgcagctgactctgtgtttaatggtttttagtgctgtagcccacattcccaaggataacttcacatcactatgtgaagcgccttattttcccaaccactcagtgtggcaggcaggcaggccattttacagctgtgaagacaagtttgcgcgactaagtgacaaggccaacaagctactcagtggtggagtcaggmtcatargtctccagatacgaactttaataagttcaggtgccacttggtctgtacgtgggtctgcttttcatttagttgcactttccttrgtaatctcaatactgatgttttatgatccttatctggtttttataacaaatttttaaaattttagaagtgatgcatgtatgatatagaaaatacaaataagcaaaaagaaaagggaaatcatttatagttctaccatatagttaatcatttatttatatttccttccagtctgtctctccaaaatatacatgtataaatctatrcattttgaacataaaactgtgagcacaactctgctactcatttgctctttctaaagtgtcagtttgacatagattggaatgtaaaagccagatgacttattttagcacttcatttttgttgttcttatttttctcactgtggtctcaatgttcccatacctaagtcatacagattgaccttagtgaatttaatagtgaaagttgacatggcatcattgttagttgccaggcaccattctcagtgctttattttcattaayacgtgtagtcttcattacatccccaaacaaagcttctaattttatcctccttttaaatgggggtaactgaggcacagaaaggccctggtatttgtccaaggtcaaacagataaaaggttgcatagccactatttggacatgggcagtgggggtctgacggctgttctcttaactgctatgctaagctgccttaaagcaaaatagtttcatgtgaataaagtaataaaggccaaaatggctgggtgcagtggctcatgccagtagtcccagcacttcaggaggcygaggcaggaggatcacttgagcccaggagtttaagaccagcctgtgcaacatggcgaaaccccatctctacaaaaaaatacaaaaattagctgaatgtggtggcacacaactgtagtcccagctactcgggaggctgaggtgggagggtggcttgaggctggaaggcagaggttgcaatgagccgagatcatgccactgcactccaatctgggcaacagagcccaaccttctctaaaaaacaaacaaaaaataaagtaataaaagccaaaactaaatggaagggcggttcctgggcttggagagcagcagccctgccaggtgcgggtctctgtaattggtgtctcttcagtgtctcttctgctctgattaattataggtttctaatgtccctgtagattgaatgtggaggttgtccccacccaaggcttggcagtagagtgcatctctaagacagagattgagagatgcgtttgtgcttataaacttttctttgaaaatctcttccttcttctactactccaccaaaggaagaggagtaccttctccaccatacccccaaccttaagaatttctgaacaaacagcataacattcagttttgtcatgaaactggggaaagaggtaatcaactgaaatgttcctactgggagagacacagggtgttgatttaagtcttttttaaaaaaaactaaatgtagagatgaggtcttgttatgttgcccgggctggtcttgaactcctgggctcaagtgatccttctgcctctgcctcccaaagtgctgggactactggcatgagccactgtgcccagcctgatttaaatcttaagaagattgggccaggcgtggtagctcagtcctgttgtcccagcactctgagaggccgaggcaggcgaatcacctgaggtcargagttcgagacaagcctggccaacatggcgaaaccccatctctactaaaaatacaaaaattagctaggtgtggtggcaggcgcctgtaatcccggctactcaggaagctgaggcaggagawtcgcttgaaccggggaggtggaggttgcagtgagccgagatggcgccatcgcactccagcctgggagacaagcgaaactccatctcaaaaaaaaaaaaaaaaaaaaaagaaatcttaagaagattgatcttaatgaagcaattgggatttgtcatctcagccattccagagaaatacggaagagtcgtggtggatggccagaattgcctgtcctgacagactgttcttttcataaattataacaagagggcatacatatattttcartgctttaaaatctcaaacaaacagaagcagagagatcattaaagtgaacccccatgtacttaatattaccaacatattgctattgactgtattttttcttggctcatgatttttcttacaatttttcgttggcatttttttcagagttgcagttaaagggatttttggattggggtggggaaaacagggttgatcttctttttggattataattctgtgatttgtgaagagagtctggaaagaaatacaccagsatgttaactatgkgcaggcagtgaagctctaggtgcttttttcttttttttttaacctttccctacttttatttattaattgttgtatttcaagggatgctcatgtctctacctttcagaatgtatacacagagactctagattgttttttaaaaatcacactgaagtgtacttgggcttcaatgtctaaaatgctcatcagagcttagtcttccgtctaattctcaaagcattaattgccaggtactgtaaactggcttaaaaagaagagaaaaagaaactgagtatcygtaaagatgctagcctgtgttggcttaccttacagtttatacatttttttgttcttgtgttgaaggtgactgctgaggttggaaagcycttgggtgaagagaaggtggatgcaattctttgygttgctggaggatgggccgggggcaatgccaaatccaagtgtgagtcctttcctgagtcactcatttgttctgctctgctctttttccagctgacaaggattgggtttgcactaggtgacaggccagctgtttttttgtgtatatcccggaatctttacagttgctcggggagagagtgattaatgctcttaatccattttacggataaagaagaagcttcccctggaggacgtgaggggacggggggcattgagtttgagtttaaagtagaggcagaatgaaatcagcatggcctgtgccccaggccatgtgctattcaggcattggaggatgtgtaggaagtgcagagatcatttagaaagtcagaagaagtcaaacttgagattttactaaagctgattccttttttcatcttttcttttcccttcccttccctcccctcccctctactcccctaccctttttcttaagacagagtcttgctctgtcaccaggctggagtgcaatggtgtaatctcggctcactgcaacctctgcctcccaggttcaagcgattctcctgcctcagcctcccgagtagctgatattacaggtgcccaccaccaagcccagctaattttttgtatttttagtagagacggggtttcaccatgttgcccaggctggtcttgaactcctgacctcaggtgatccacccccttcagcctcccaaagtgctggggttacgggcgtgagccagtgcgcctggcccatttttcaacttttcattatgaacatttctaagcataccagaaaagttgaaagaacagttcaatgaacacccttatatgctccatctagattcagtaactgttaacatttgctgtacttgagttgagcttgttttcttgtgcctgtgtactttgtgcattgttttttgttaactgtttgaaaataagtttacacctcactatatttccgcgtgtttctccaaagaataagcccgtcctacattattatggtaccattgtacctaagaaagttaacagtgattatctaagattaatgatattgagcccatattcaaatttccccagtttattccatgtctattatagttctttttccctaaacatattccactcaaggtttatgtactgcattatgttgtttttagtctcttaatctagaaaatctagaatttttaaaaaaatcccctgtgataagactttttgtcaagtccttgggagttttcatatagcatgtctcacattctgaacttgtctgaacttttctttaaggggttgtttgacttgttcctctatccttggtattccccgtgaactggaatttgggtctagagactcagttagatttagcataaacattcttgtggtgcgaattcttcctgagtgatggtgtgtaccttatatgacatcacctgggaagctcagcatggcagcttgccctacccttagggatgccaaatttgatgcttggttgagatggcaactgccagacttccattataaaggtactttttttctgtttgcagtaagtcagtcatctgtgggatgtgtggtattgtggtattgtgtgtgaatgtcctgtttcccaagtattatacttttcacccagtggttttagtccttcgttgataatctctgcctgaagcacttattcaggggttggaaaatggtagttttctaattctgtcatcccttctacatttattagccaaagccatttaaaaagacgttgacattctgtgacccacatgtcaatgtgagagtggtgctttgtgaggtgatcaggttagcaaaacagcttgataacctttttgtatgttttgggagcaagaaatgataaatgtggatccatcaggtttttttcctagtcttttttagtggggaaatgcaatttcttgtttatcacctaccaacccctcctatatcaggaggacatccttttttgatcaccaggtaccacatgcccttcgagttgcccagttggtggtgtgacatatgttaccatttgttcttccttatgtctctggcaaggccggggagttaaaacaagtgtaaaatggttgttattttagctttcttttgaagagtctttaaagctaacattaaactttcagacataaaatatgtagctcagtaaaagctctctttatagctgtacagtaataggcccttggatttttatcacagagaaaayctgacgtagacatataggttcttattacaaatctgataccattcataaaataaaacaatctttgaattaaagccagtccagcaaatcagtaaactccaggtttattttgtaaaatttattggccaacattttgccagtgtataggtaaggaagctgaacctcaggcaatcccatggcctggatttgaacctgtgtctctgaccactgagccctgtgctgtttgtgttagaccttgctgtagatagggacctggggaccaggagggagggcctccctgrgtgtggggcygcatrarttgagctcaccttttggtttctttcctgggaatgctgagcccacatgtttttttcactcagctctctttaagaactgtgacctgatgtggaagcagagcatatggacatcraccatctccagccatctggctaccaagcatctcaaggaaggaggcctcctraccttggctggygcaaaggctgccctggatgggactcctggtaagcctttatttccctatctgtggagtggggttgcttaccttgcttgctggggctgctgggcactttcatgggatgaggactgttaaagcctttaccctctaagctgcttaacagatagatggattttgtcttcttttgggcctgaatcattttagggagaagagttctgatcttttgtttgcctgtccttatgtttatggtggtggtaaggaacgctatgatctggtaacccccatttagtttatttatctgtgatctacactggaatgaatggtttagtggatattaattaattaataaacatggattattattatcacattgaatccatgtgttccagggaagcagcttagcagctggaaatagcataagtttaaaatgagagaggttcatttggccagcacagtggctcacacgtgtaatcccagcacttttgggaggctgaagcaggaggattgcttgagcccaggagttcaagaccagcctgggcaacatagtgagaccctatctctacattagaaaacaaaaagagagtgagagggttgggggtggattctttatcctagatgtgtgaccctgaaccagttcttcagtctctgaccagatgtctactgtagtttccttaattgtaaaatagtgacagtgacatctaacttgaagagtactgtaaaactgtagaggtgtagctatgtagaaagtgcacatggtaggcacccataaatggcaagtcttactgttaytcacaataaatggtaggtcttatagtcactcttttcatttcacatatattctcactttaatctcatcaatattatctttttcagtttacaggttaggaaactaaaacttggaragttaagtaacttgtctgggtttgtgcaggaagtaagttgcagacttacttgaaccaaaaccctaatcatctaccaacygtgtattttttccattatgtcatttcttttgcattttttatgacctgtattagtttgtttgggtagccacagactgggtggcctaaacaacagagatttattttctcataactctggaggctaaaagtctggagatcaaggtatctgcagggctggctccttctgaatcctcttttyttatagatggctgccttctccttttgtctgcatgtggtcttccctctgtgtgtctgtcctcgtttcctcctcttctaaggaaaccaggcatattggactagggcccatctcaatgggctcattttaactttgttgcctctttaaagatcttcgaatacagtcccattctgaggtactgggaattaggacttcaatatacgaatgttggggggatctatttcagcccataacactccctgtgggatagggctaaaggaatttaagcaggggtagaaaggggcagcatagggaggcagaaagtgtctacctcaactacctaagttgaactcttcttttaaaaaaatgggagcttttggccgggtgcagtggctcacacctgtaatcccagaactttgggaggccaaggcgggtggatcatgaggtggagattgagaccaccctggctaacacgatgaaaccctgtccctactaaaaatacaaaaaattagccaggcgtgatggtggctgaagcaggagaatggcgtgaacccaggaggtggagcttgcagtgagccgagatcgcgccactgcactccagcctgggcaacagagcaagactccctctcaaaagaaaaaaaaaaaaggtggggggagctctttttgactctcttgtaagtggtagagaccttgggacccttctcagttgtttatttttttagagacagggtctcacccaggctggaatgtagtggtatgatctagctcactgtagcttggaactcctgggctcaagcaatcctttgcctcggcctcctgagtagctgggactgcagacacacactgccatgcctggctaatttttgtattttttgtagaagcagggtctcgctatgatgcccaggctggtctcaaattcctggcttcaggtgatgctcctgccttggcctcccggagcactgagactactggcatgagccactacgccaggccccttctcaattttaatgtaactcactgaactgtgaggctgtgactactagcaataccttccctctcattttcttcttccatttcttagagcatgtgatgttacaagtccatggctatagcaatcattaaagctgtgtaaatgttagctgtctggttggttgagatctgatttttatttaagatgacacggaacagaggcagtagaaagtaaacagagaaatgagtcttagcttgacattttaaaaaacaaaaccctaggaccaaaagactgatttttctaaatgacagaagagtctcctactttcctttggtttgcaggtatcctttgattacattttgggtagtggttaagactkcaggctctggaactgtgcacgttggacttctcttaaggctctgccacttactgtgacacgttcggcaagttacttcgcctttctgagtctgcgttttgtcatctgtaaaataagataaaatagtgtctcctttatatatatggtggttgtaccttgtaaatgtctcaatggatctaaatggatgagaaaggtattacagagagtcaatagtaagtgtgagccattattattatttactccaggcttatttctgcccagctgttctgcctcagatgttaatgaatttgttcatctttaacctcttaagttagattttgttaagctattaataatttgagtcatgagatcttttaagtatgctgcagacctcagaaaaatctggggaaatagatctacaatttgaaagtaaatgatgaatcaggcttagtagtccctcaaactcaagaagatttgtttgcacatcagaagtttttcacttggaaggatactgagaaaacctcaccctcctatttccaagtttgtatttctagactgtcttctgtaggacaaacagtattaaaatggtgttcacttttgtttaccattaaaggatctgtgctgtgattggaaatcagttttgggggaccacactgatcattcagtaatttggaagtgttgaccttcttagtgaaatgtcttttttttcatatcttgcaaataaccccttttgtgtccccaaggaaaggtcattctttagaattaagccattacggttgctatttgcttgtttctttcctttgtcagagtccctgctcttgtgttgtgttgttcgaatggagtcaagagagagctctgggattttgaggaccagggctgggttaatgagcacttatgccctggtttattttaatcactgaagagtttgttatgccccctgattaaacagagaagctaaggatggcgaaatattcttcttgtgcttccaaatagctctttgagaccttgaccctcttttgcaatttgaggtagttgttgaagcagttttgtgattggtcccttggctgggctgtcatccccccacctcccgctggacttgcgatgcctccacagcaattacatcttaaacagtgtgtgtgccgaggattttagggagcctgatgacctctagaagaaatagtggttttcagaaggtggagaagtttacagtgactcatcattccttcttgctatcattattctgtgatagcagcatttagtgagcagctacagttgggcacagtgggggaacataaagaggaaagactccattcctgccacatgcctgcggggcagagggaaacctaccttaataaaagacatcccttgcttctgtcagcaaatatccatcgaatagtgggaggaaaggaagaccaataggtagcaggtatacacaatgtcaaaatttgctcaaatggtacaccctaaatgtgtttaagtttattgtgtttcagttatacctcaasagacttggcgaaaaagaaagaaatatttttaggcatctgtcttctgggtgcttggcttgttgggctaagcttgatcttatttcatcaccagaggtatctgtaaagtaggtcctattattttcccttgattatggaggaaaaaaagttcagtgattttaggtgccttgtctaagacaacctagctagttagtagcagattggtctgagtaatacattgatcagtaattaatatataattataatcagtaattatagcaattactgataatataattatatagagataatataattatattcagagcctcctccggcagcaagggtgcgggtggtgtgagtgtgagaccgggctacattacggtctaagcggagtgctcttggtgggggtgagtccacctctgaaaaggttttgttgagggagctgattcaaacagggtcttggaaaaggacttgctttgacaaatagagcttatgggaaaagacaaggcactgtattagtttttatttaaataatttaatcagtttttaaatyggaaaactaaccaatgcatgtagtaaaaattcacatggcactaaaagaaacacaatgaataggaagactctctcctactcacaccgctgatctctatggcactccctcccaggcccaactacagtgatggcttctcaggtgtcctttgggaagcattctgtgcccattctagtgtgtgcccatgtcacattcacatactttttaaaaagcaccataatttggcagggcgcgatggctcatgcctgtaatcccagcactttgggaggccacagcgggtggttcacctgagttcgagaccagcctggccaacatggtcaaaccccatctctactaaaaaatacaaaaataaccagctgttgtggcagtcacctgtaatcccagctactcaggaggctgaggcaggagaatcgcttgaacctgggaggcggtggttgcagtgagccgagattgcgccactrcactccagtctgggtgacagagtgagactctgtctccaaacaaacaaaaaaagaggctgaggtgggaggattgcttgagccctggaggtgaaggatgcagtgagctgagattgcaccattgcactctagcctgggcaacagagtaagcttgtctcaaaaaaaaaaaaagamaagcaccataatttgatgactcgatagaggcttttccatgccttattcttttcacttcatcatagattaaataatttaaaagttagtttgtctggmatattgagaaactcacgagttactgagaatcacctaccatagttttaatgaacagagctaccagtttgttcttttttttttttttttttttttttttttttgagacagttttgcccttattgcccaggctggagtgcaatggcgcaatcttggctcaccgcaacgtctgactcctggttcaagcaattctgctgcctcagcctgtggagcagctgggattacaggcatgcatcaccacccccagctaactttgtatttttagtagagacggagtttccccacgttggtcaggctggtcttgaactyctgacctcaggtgatccacctgccttggcctcccaaagtgctgggattacaggcgtgagccaccgcacctggccccagtttgttttttcattcccacagtttttgagtggccaccatttgattaagccccattatcctcctttgagaaacccacctattgctcttttctgaaagcagtgaataaagtatttatttatttatttatttatttattttccttttttttggagatatggtctggctctgtcacccaggctggagtgcagtggcgtgatcttggctcactgcagcctcgacctcccgggggctccagccgtctttccacctcagcctaccgggtagctgagactacaggcgctcgccatcacacctggctaatttctgtattttttgtggagacagggtttcaccatgttgcccaggctggtttcaaactcctgggctcaagagatccacttgccgcagcctcccaaagtgctaggattacaagcctgaactacctcacctggccaaataaagtatttattgattgccaccttttggtttgggatacattggtgaacaaaacaataaaaatccctgcctctgtggaacttacattcttctgggaatgaaagagccctttcgagtttatgagatgtgtcacgtttcatgtcgttttcaggaaagcctatttagcttagcattggatcccatttagcagggaagaaccagaggctgaaagagctgctcgcccaagtcacagtggtgaggaatcacctgggttccaacccctggcctcgaagtccagattctgggttctttctggtgtgctgtgccgttcctgggagccagggagctgccttgtgcttcttcgtctttctaacactgagcctagggattcccacatagaagaggctccatgacatggggtggggtaagtgggttttgatgcccgggagcaggcagaccctggcagcccctttccaggctctggctttacaggcagcagagtgatggcaggttggtttgatggtgttaaggccagagttgtcaccatccccgtcatgccacagtccttccactgctgataaggaaggaaatgccccggatgggccgcagatgactgcttgatctggagaggaatcatctatgataatatgaataatgatgagctgggagagtgggagaagcatcaccccctccctgccgcagtcactgggagaacatctccctggcaaggtgctgagcaaagcccctcctacaccaggctgggctccctccgccctgatcgggttctgtgcgtgccctccatggtttccaaggcccttgttggatgcagtctccttccatcctcagcagagccttgtgaataaattgtgatctgagttaccactcccactgacagatggaaaagcaggcccacagaacctgtgattttttttggtggctggaaaaacaggagttagggctgcactttttgaattccaagttgatgaccctttttgcaattccttattgctgtccgaggaaaaagagttgccagtgacctgctgagagtcatgaatgacaataatggccaggattgagtgttcctctgtgctcagtactgtacaaaggggatttgttaacctggaaaaaaaacaatcaatggagttttattacttgacataattaaggaggatgctggaagtattctccaaagcagcgtctctcccaggagggtttcatggggtgatggagaggggaaagggtgtgtcattgcatgtggaggaggggtcccagtggcacagatgcagtgagtcatcacgccagcacatagtcacatgttctggtgatgaagctgtagctcctcccgggtggagactgtagcatggtaatgaggaaagtccacttgggatcatctctataagttgctggtttcacctgacttggtgactgcattccatgcaagttgtgggaaaaaccaggctgaagggcaggagcctgtgaaacaggctgattgttcaagctgatgaaactcctatagtccttggagaccctccctgtctgctacacttgtacatggtattttatttgattgttgtattatccttaggatttgggattgtcattcccatttcacgaaatgggaaactgaggattccaaggtttagtagcctctcccagtgtcagtcactagcaagcagcagagcctggacacgaagccaggtagtcrggttccagggcacattacttctattgatttgatgggaaaccttcattgagtgcctgtcctgtgctaagggtatgctcacaattaagtactctattcctgtgtgtcgttatgagcccctctggatcacacctgagtttatactgataaggtgattagtaggttggggcccctagacagcctcaggatggagctacttcttagaatgaccaagcaattaggaggttagaacttkcagctccacctaccgacctcctggaaggaagcaggggctggagattaagctctataaaaacttacagatgtgataagcatctgggttgaacacatggagggcactgggagggtggcgtggctggagcaggcgtggaagttccatgcccaccccctctcctaccctgcctctgtgtcattccacctggctgttcctgagttgtatcctttataataaaccagtaactataaaaaaagcgtttgcctgagttcttcgagccattctagcaaattattgcacctgaagagggggttgtgcaaacccctgattaagcttgttggtcagaagtctaagtggcccaggacttgtgactgccatctgaagtagggtaggtcttgtgagactgagcccttaaatcagacgggagtacagtgacgtgatcatagctaattgcagccttgacctcccccaggctcaagtgaacctcccacctcagcctcccgagtagccgggaccacaggcatgtaccagcaggcatggctaatttttgtagagatggggtcccactacgttgcccaggatggtcttggaactcttgggctcaagggattctcctgcctcagcctcccaaagtgctgggattaaaggcacgaggcaccacacctagctgggagttctaattgaattgtcagacacccagttggtgtctggagacttagagaattgactgtgttagaaaacacctcaaacccattttacagatgcagcaactgaggattagagaggttttgggaactttcccagaatttatttagtggtaagtggaggaactgggatttgaatgtgtgtaatttgactttaagtcctatactccaagtgactgcttgattttgctgtcccattgagtacctctgtgtgccaggtgctcacaagcatttagtgatcaaaaggttcagaacccatttcttgcctgggctttaacctctccatcagctttggcacaagtctgtgtgtgagcctggcatgtactcaacctgtcttgagtcttggtttcctaagaataaaaataagatcaaccttctggcttttgtaataaatgttaagtgttagatgaatagtaagtacacctgaaatgtcatgtctcctccacttttctctccataaatgttcatttatcttttcttcctggcctcttctggaccctggaatgctgcagcttggatgcaccggtggcctgtgtgaagcctgtgtgttcttggaaactggccagaggccataaytcccaacccacgtgttcccatcccctctttctcgtggctctctgccattttttgatgggggttggtgagggcgtctgacctgaaggaggaggccagatgcagctatttataaagttttyagggaatagagatctcaagagaagattgcatgtccttgctgtccccctggccgccagtggtcactgagccatcttctccccatttcccaggtatgatcgggtacggcatggccaagggtgctgttcaccagctctgccagagcctggctgggaagaacagcggcatgccgcccggggcagccgccatcgctgtgctcccgtaagtgcttggggttccctggcygctgcccacctctgccccactgctgcaggtgaccgtttgtctgactgtagctttccacaggcgacctgggtgtgctctcacctctggttctgaaacacaccaaagtctcttaagatacttattatcttaatctgtttgaattgctctaacaaaataccttagactgggtgatttataaacagcagaaatgtattgctcacagttctggaggctgggaagtccaagatgaaggcaccagcagatttggtgcctggcgagggctcattcctcatagatggcgccttctatatgtgctcacacggtggaaggggcaaatgggctccctccagcttcctttataagcatgctaatcccctcctaaaggcccccacttgtctcctgcagaccccacctcttaatactattatgttgcagtttgtgttttgtatgtgagtttgagggggatacattcagaccatagcaatacttccagttttgggttctcctgggctgtccagaatgtttgattggctggttggatgggtctgtcttttttgcctctttttttcctctccctttcttttctcccttcatttcttcctttaaaattagactacacattttacttttttatatgtagttctgtctttcaagtcattatatggggtatgtatgtgtgagagagagagaatatgggaaactgttggaggtgtttctgttggtcatcgggggactgtcccccatcagctgtcccaggcagaggcagctgctttggagggaggctactccttctcgctggaaggcttccagcaccagcaggcttgcctcttgcctgtggtcctataaagggatgctgagactgtagggactgcactgattgactttctggttcccttttagttgtgaggttctgtgattctgtgacatgattcccacagctgttttgaatgattcgaatgattcctgaggccttgatgttcttgggagattcatgcatatctgaattctrtattattctgccaaaaatcttaaggttttgtggaaaatagccacatatttaaaattttagtattttagtattctcatatttaaaggcatataactatcttaaatccttagaaatgagtgtgctgcatgttagggagtgaataaagacacagcaacaaagcagtttaattcagtgaagactcttttttaaaaaggcaaaatgtggctccttctgttttgttcttatctgcctaagtggtgagccacagcgcaccttattgaattatgctcagatctggcctttgctagcggggacagcttcctgctctctctctgcttatctttctgtctgatctttccatgtaaatagcaccctcagtgccagaggctctaggttgtcctgctgtatgtttgcgttttcctggccaagggggactgggcacctgttgttagaaaggagcgacatgaatgacgtgcttatctgtgtccattgcagggttaccctggataccccgatgaacaggaaatcaatgcctgaggctgacttcagctcctggacaccctkagaattcctagttgagtgagtattacagacatgtccatgactgagcagcttccagcccctattctctgcctgctgtggtccagaggacaagtctgtgttccctgagatcgtcaatccgggtggtcttgggaggtctctgggactctgaggatgcrttgcacatcagacggaatctcagagtagctggacttggagacaggcagcacagtggcagaatgggtagtgcsgacatgaatcctggctcgctccctcaccaccggccatgctgagcacattattgacctgctgaggcctcagtttccccacctgtatcatgaggtccatcatgcttgttaggattaaacgtgatagtgtgcggcaagcactcaacacagtgtctggccatarcaagtgctcagtgatccccagctgcagtttgtgtccttactgctgtgatgaggagactccatgggggagggggacaccacgtagatggcctgggggcacatatctgaatctgtgtcaagccacagacccacagaaagtgccctttaatttccgaaatcctttttgcccatttgtgaatatgggtggcatttgaacgctcatgggacagagagctgaattcctcttttgtgtttgtttaggtatcagttcctcaagcccctctagttagtaagcatgtgttcatcgagcacccactatgggccaggtgctgccctcggctctggggtcacggtgaggacaaagatgggatccctgcccacagggagcaggggtgccgagagggtcaaggtgacagcctgacccagtagtgcctctgtgtaaactgctttgacgactgtttataagagatgtttgtgaagttagcagtgtgcttctggcctgatgtcacaatctcatttaaattaaatcgggagaaatttgggacttgcgttttatgtttgaaaygtgtacttacagaacactttttatgtcccagtcaccattctaagcacttcataactcttatttaatgctcatagcaaactctgagggaggagctgtcatttttatttaaggcttagagacttggagggatggcaggggctaagtcactcgcctaaggtcacacagcacagccgggatctgacacaagtggtgtggctgcagaacctatggtcttaactggtgtgctgacagttatttctgtctatgccaggaatcatgcttcatgcttgatttgcaggaaaaaaattgaagttgtagaggaaatcaagctttgaattgtgtttgtgtttgaatttctttttaaaggccgacactcccaccacacttgagatactgatctaagacctactctagatggaacatctgggatcttgtgtctgaactcgtgctgagccacagacccacagaggacgggctgtcacaggcccccttttgttctagagatcacatccacccatttgtggtatttgaaaactctcagaaaagctggcataaagtttgctttgagatgtctgtgagcacatccttcctctaccatccctggttagaatggcgttctcactcacctatccacgctgcagatgagggtgaagaagtaaaaccatttaaaacatgcatcgcagcaaaccaacatggcacatgcatacctgtgtagcaaacctgcacgctgtgcacatgtagcctagatcttaaagtataaaaaaacaaaacaacaaaaaaacatgtgtaaccaacacacaaaaccctacacaaccaaacggcactggtctctttcagagccttccctcaccaagccctaccctgtccccagagatgaggccatgacatgacagtactttagagagttttagcaacgctttgttttttgagcccatgtgctcatatgagcttgttcaaaccccagagtaggggcctgaatgactggacctttacacatcagcgctggcccagaaggttacagattggcactgggagtctcccaggaaggaamtgctgagcactttttagttaatgaaggtccgaagtctcagctggtgaattgtcaaaatggatgatgtactcaaatgtaaatgttttgtgttaaagaattatcatctacttcttgtttcttgtgaatttcttttgccctttttcattcctgtcttcttagagggtctttttgactgctgcaagtggggtcagttgctcctctcctcagatttgtgaaaggccctgttactgtatttaacattttattgtaatagtctgtttttttctatctctttttccattgtttggtgcagctgtgggtactctataaatgtttgattaaaaaaatgccaaataaatgaattgcatctgtttctctcataaatttatgagaaggtaatrtagcaaagtattgtgcatgtgtctctctctttgaatgaactaattaaaatctttaaaaacarttttttttttttttgagacagggtctcactgggtcacccaggctggagtgcagtgtcacratcatggcttaccctagccttgatctccggggctcaagcaatcatcccaccacagcctcctgagtagctgggactacaggcatgtgccatgcccagctattttttgtatttttttagaggtagggtttcacccagttgcccasgctggtctcaaaaactcctgggctcaagtgatccacctgcctcagcctcccaaattgctgagattacaggtgtgagccaccacgcctggccaaattagaatcttttaaaatcacaaaagaattccaacaatgtagaaaaataccaaaatgaaagttaaacttatgccaaatcctgccactcagagattagaatgagtacaccactgaactcactgggggcctgggtatgtgtccatcatgcctactgscttttattwattttttattattttttggagatggaatcttgccattgtgtccaggctggcctcaaacacctgggctcaagygatcygcccgccttggcatctcaaagtgctgggatcataggggtgagccataatgcctgacctttagtggcttttatttatttatttatttattattttttgtgagacggagtctcattgtgatgcccaggctggagtgcaatggtgcaacctcggcttacctctgcttcccgggtgcaagtgattctacttcctcagcctcctgagtagctaggattacaggcacgtgctaccacggccaatttttgtatttttagtagagatggggtttcatcataktggccaggctggtctcgaactcctgacctcaagcgatctgcccgcctcggcctcccaaagtgctgggatcacaggtgtgagccrtggcgcccagcccttagtggcttttaaacagtcgctgctgtgccaccccttccccccaccccacaagccgtcactgtgaaggtcagcatgtgcccagwtttttgctttgagaatataaaaaaaactyttattttctgttccagaacttkccatgactggatcacagggaaaaaccgaccgagctcaggaagcctaatccaggtggtaaccacagaaggaaggacggaactcaccccagcatatttttaggcctcatctcagtgcctatgaggggcctgccagaaaagtcactaacctgtctcagtgtggccttgtccagccttgtgttttctgtaacccctgtttgtggtacgagataatgagtcctatttttctctcacataatatgcatttgctctcctaggacagtgtaatacatttatgtgaagtaaagacatgcgagactggtggcctgcaaatagcatccgtyratctgtgttaactgcatagggagggctctgcatagcacctgctatagcggtgtcatgttggatcgcttttgtgactgttcatctgtccttgacagtggctgtcatcttgactactttgttgatttgttggtattggggacattttaaaggctgagttatttttgaatgtcatgtttatgtcrtagaygtagttttcgcatccttgaattaaactgccttaactccttttgtggtataagcaaaactmcatggactctgtcctggtatccttttcctgtgtggttgcccygtgtcctctggcctagggttaagtgtgcaagataactactcgtgagtattcagaatgttgttcctaataaatgcacttgttgtctgtcttctttaatcaaatcacatcttayatacagcagtcagagatgagtatactagaatcatggattgctggaggtcttttaatctgrtgttctcrgaagggggtggatttaaatcctgaaataaatatttcaacacaagaacacaggcctgattctgccttggacatgtcaaaatctgggggtgatgggatggccctgtgcatttagaagcagctctccacatatggccaatgtaggctgtcctggtygagaactagtagtggtttaatccaacccgatcattttacagatgaggaaactgaggcccagagagacattaccttgttgccagtaactggcagagctaagcccagatctctagtcaccagacagttgctgtttttaaaggcctttaccacgtattttctttctttttttagtgaggtgaaattcacataatttttttwttttttttttgagacagagtcttaccctgtcgcccaggctggagtgcagtggcgccatctcggttcactgcaagctccgcctcctgggttcacaccattctcctgcctcagcctcccgagtagctgggactacaggcgcccaccaccacacccggctaagtttttttgtatttttagtagagacggggtttcaccgtgttagccaggatggtcttgatctcctgaccttgtgatctgcccacctcggcctcccaaagtgctgggattacaggtgtgaaccactgcacccggccaaaattagccattttaaggctaattttaagtattaaaagttaagtaggtgagcagttcagtggcatttagcacatttacagtagtgcataatcaccacctctgtctagttcccaaacatttccatcaccccaaaagaaaaaccagagctctttaagcagttcctccccattcctgctccctaacccctgcaaccaccaatcttcattttgtttctgtgaattaattctgggtattactatttttttgagacagtcttgctcttacccaggctgaagtacagtggcatgaacatggctcactgcagcctcgatttcctgggctcaagcaatcttcccaccttggcctctcgaggagctgagactacaggcacgtgctgccacacccagatattttttaaagttttttgtagagacaggtcttgctatgttgcccgggctggtctcaaactcctggactcaagcagtcctcctgccttgtcttcccaaagtgctggtattacaggcgtgagccattgcacctggcctgttctgggtattttgtataaatggaatcagtatgtgaccttttgtatctggctgcttctacctagctttatgttttccatgttcttccccattgcatcatgtatcagtactttctttctttttgtggcataatattccattatatgtatccactgcaattttgtttactgatctgttgatagacatttgggctgtttccaccttttggctgttgtgagcattgccgctgtgaacattcatgtataagtgtttgtgtatctgttttcaatgattttggatatatacctaggagcaggattgttcgaccatatggtaatttytgtgtttatcttttttttttttttgagatggagtcttgctctgttgcccaggctggagtgcagtggtgcgatctcagcacactgtaacctctacctcccaggttcatgtgattctcctgcctcagcctcccgagtagctaggactacaggtgtccaccaccacacctggctattttttttttttttttttgtatttttagtagagatggaagagacagagtttcaccatgttggccaggcaggtttcaaactccagacctcaagtgatccacctgcctcggcctcccaaagtgcttagaattacagctgtgagccactgcgcctggcctctatgtttaacttttgagaagtctcttgattcttgccactacgaggtgattttatccaactattacaggaaagaaaatgggagctcagaaggttggactgcttgttcaaagtcacctagctagagagctgcgcagctggaactagtatacaagtctagctgttgaaagcaccctgagcacattacctcatgctgtaccttgcatgtcttgttgttttcaattttcagatgaagaaacagttccacacactaagagacttaacgagggtacagttagtttcaggagagctggtagttttcattccgtttagaacyggacctggtaactgttgattatcctaataaatgcacttcatttatcgtgttgcctttttattttgagacagagtctcgctctgtcacccaggctggagtgcrgtggcatgacgtcggctcactgcaacctccgcctgcctggttcaagcgattcttctgcctcagcctcccgagtagctgggactacaggcgtgcaccactacacccagctaatttttatatttttagtagagacggggtttcaccactttggccaggatggtctcaatctcttgacctcgtgatccrcctgcctcggcctcccaaagtgctgggattcacaggcgtgagtcaccgtgcctggcctgtctctttaatcaaatcacatctcatatccagcagtcatagatgagtatgctagaatcatggactgcttggaagtcttttaatctggtgtttacctactcatccgttggtggaaatttgggctgcttattaattattaattatttttaattattgaataccagatctggtttctaaatggaatgaagactaccagctctcctcaaactaattgattattgaggtgtgtttcttttccttccctggtgatgtgcaaagagaatgaaaagggaaaaggggccaggaaggagatgttttttctccttcattcattcaacagctaatcttgagtaccaactgtgtacaaggcactaacctagatgcctgggacacataaagaacaagtagacaaagactcctacccttaatcattgagttttattctagatgggggagagggtgacagataataaacaatagaattcataatatgaattcattggagagtacgagaaaggtgaactgtggggggaagagagcaaggtaagggggtgaaggagtgttggggagattgggattgcaatttcagaaatggtagtgttatgaactgaatgtgggtgtctcccccaaatttgtatgttcaagacctcactctaatgtggctgtatttggagatggggcctctaaggaagtaactaagatgaaatgggttcgtgaggatgggcactgattcaacaggattagtgttcttatgaggacagacaccagagttctccctctcactttcttcccacacgcatgcactgaggaaagtctgtgtgaggacacagcaaggaggctgccgtccacaagctgagaagagagccctcacaagagatggaattgactggagcctcagtcttggactttcagcctccagaacagagaaaataaatgtgtgttgttaagccacccactctgtggtgttttgttatggcagcccacactaatacaggcagtgatggamtatctcgtgaggaagtgacgtttgaacacatctgaaagaaagtgtagaaggcagccaagggcatctgaggtaaggacattttaagacagaggaaccagtcattgcaaagagcctgaggcagtagtgtaccaggtggggtgaggaacacagggaggctgggttggctggggcagagaatggagcaaacagaggggcagtttcaggagataagatcagacagatgattgtgtagggtaggggtcccccaattttctaggcccacagtgcccttagtgtctcagtaattttttacaatgcccctacatcaaagaaactaactaatgatttggatttacaagtggttgggttctaacaattttatagtagtaatatgactgatattgctctatgacctagaacatggaaagtaccctgtagagtccctgtgaatgctgccttggagtgccttggtgcacagtttgggaatagcaaatgtaagggggtgttgggcattttaaggatttggttttggattttgggaactaccgcaaggattttgagcgaaagagtggcatgatatattttaaaagattgctctggctgttgtgttgaggatagtactgaggtttttgcaagaatccaggcaagaaatgacagtggttagggtggtagcagtggaggtcgtgagaggagaattgggaaatggtggatattttgaagacagattcaagaggatttcctggtggatttaatgtgacggtaagagagaaaagagtcagtgatgtctcccaaagtttttcacgtgagcaaatggattaagttagcaagtgtgatagagaaggctgtggatagagcaagtattgggagtatctggagtgttgttttggacatagaggtttactctattaataccccagtggagatgttaagtgggcagttgtattaagtctggtgtttgagagagagagagatctaggggtcctgagagatctgggggtcctaagcagttaaagttatgagactaggtgagatcactaagggaatgtgttggccagggtccagaagacagaagccatgcagtattgtgaatgaggtcagtgtaatataaagaattatcgagtagcaaagattaattctaaaaggctaatgagaactctgaagaatattcttgtgccgagggacagcacttgaggaacaaatttggaagacaagtccctccccaaggctgggacctgagcttcattggagaaggtatggcggtggacatagagtaggacatagagaggtggacatggagaagttatggcactggacagcagagtttgttgggttccctgggcctgtgttggtctacagccactggggaagcaggaagcaccctgccagggtgcatgaagtgctgctggatgtccctcacatgtacatggtaaccatgtggcaggaaccatatggaagcacaccagaaccaggaaaggaagccccctcctccaacactctgtgttggcaaaactgaacattgtatcagctatgcaggagaaatgtttacagagtccagttccattattgcagaacagtcaatgaagggtggctttggagcagagaggaaataaattggaaactggcaatacactaaatatgtgagaagagaagagaagaagataatttctctgataatagggagaaaaaaaatcaacaaaagggcactgaaagagaacaaccaataaagtaggagaaaaagtaagaatgtggtgtcccaggaataaagtgaagaaagtatcaagaagggagggaatgagcagcagtgttgaatgctgtgagaagtcaagtaagataagggctataaaaactgaccattggacccagctgtggggaggtccttgcgatcttgacaaacagttcagtagagtaatggggagtagggaatattcgagtggggttatgaaagcatgagaggagaggaaatggtgtacagacaactttaacttaggttaggtactttgttggaatcttctaaactttatccttgaacagaatctggaaaactctaccaggtttttgaatctgtttgttctcacaggtatgctttatagctgaaatcatttcttagggaattgatcagatacatgtaatttgaagcctggcttattgaattttagcttccctcagcccgaacttgcctgaagacagcttgcctctaggtgctaatttcctgctacattccagattgtggcttctgcccccttccaaatgggctgtcaccagcttggaggtcagcctgcatgttcctggaagctgagagcgtacacagcttctaggaatagaacagcatgccatggggctcctccagagtactggggaggaacccgctgtggtctgttccattaaacaattgtgactttttctttggaactttcagtgtgagtataacctacacctagaagcaatatagagttatagaagggccctgagtcaggtcacatgaatttggacatagttcttccatttacttgctgtagaaccttgagaatatttcttacatctccatatctcagtcatatgagaaacgggaacattatcatgatctccagggattaaacaaatgaatgcatgcaaaaggactggcatatagaagtgctcagaaagtattggttgttattcttattatctgtttctaattttatatggaagtatgacgggaaagtaaagttcatgtcacacagcaygtggcaatacttcggttcttattgccaaataatattccattgtatggttatgccacattttatttgtccactcatcagttgttagacatgtgaattgtttctgctttttggccatagtcagttatgatgctgtgaacatttgcaaaactcaccttttgtgtgaacatatattttcatttcttttggtacatgcctacaagtagagttattgaatatcagttggtgactctatattcaaccattttagcaattactagactgttttccaaagcagctgcaccattttacatttccactg

SEQ ID NO: 95891 - DNA, 163398 bp, Homo sapiens
aaatgtccctgcccaggctgtactgaacatggcaagctgctacaaccgggcctttcctgcccaagtgaggctcctctggtgggcgttctgtgctctgcagctgcaatccagcaatgttctcagctgtactgcaagctgagacaattcctccccagttctccctgctccctcctctcctctctcaggtgtttgttctgaggtctggtttggaggctctccctgtcactcggtttctctcccctttctctttcacaggcatttgccctaatgaattgctcacatttccaattctgtcttgcctgtaatctcagctactcaggagggaggctgaggcaggagaattgcttaagcccaggagttagaggttgcagtaagctatgattgtgccattgcactccagcctaggtgatagagtgaggtcctgtctcaaaaaaaaaaaaagaaagaaatttaaaaaagaaaggccaggcatagtggctctcacgcctggccaacatggtgaaaccctgtctctactaaaaatacaaaaattagctgggcatggtggcatgcacctgtagtcccaggtacttgggaggctgagggaggagaatcgcttgaactcgggaggcagaggttgcagtgagcccagatcatgccacagcactccagcctggtgacacagtgagactccgtctgtctcaaaaacaacaacaacaacaacaacaaatcctaaaaaagccctggtaaatactttccttggggaatgtgggggaaataatatgaaaaatacaatcttcccattctcatttccctaagaaatgtcttgggggtttgtttctagatggagaagcccttccctcagggtaagaggtcctcaggataagcctccaggactctgctgccatttcctgaggccgactctgagctcactgcagaattctctaggtggtagcagtggttcttgtgtgatgttccagtaattgctgcacttattttagacacaataaaaagtgacagagccagcattgaccctaagagccagtggggactatgtatcttcaaggcctaaatataagctatttcagaagacaaaagtccaactggagtgacgtatcatgcagctcttgtggaaaaaaaaaagcattttcaaaagctgcattatttaaatgagaaatgcatatatttaaagggaagttccataaaagtcatttgagattccttttctttcaatgactgtattcagcattgtctattatctccatatatcaatagtttaaaatattttttcatagacctgccttttcagaaacatcttctatgtcactgtatttttaattacttgctcagtgtaatttattatgctggaactaattgtgttttaattagaaatgctttgctaaagagaagaacttatcagtttgcggcggtgtttccggtgcaactacaaagcacgtctcctgtttttcttaggatttttttataaggggacagccacataatgtgtttttaatatttgttgtaaatatttattaagaatcctgtttacttgcctccataactctaagttgttcctctttaatttttccttattttagttgctaaggcaactgttttgactactgtgacagttttcctgcccaagaaagttactttgagtgaccacccactcctcttgaaaacacattttgctttctccttccttctgcactctgagaggtagttgttgaatattttaggaataatttcttcacctcttttctggcaagagtcagggaaccctcccagaatctgagcatccagattttgcctcacaatcctcacagcagagacacttcagggagggaaaattacaaacctagacagatccggagtgttcagccattcaaactggcctgcctcacaaatcaagtcccaaagatttaacatctatatcgtcaagtaaaagataaagtgggaatccctagctattagtgaccataaagtcaatcgttagaaacagtttggcctctcccaggtggctaatctgggcatttcatttctcccccagattcaatcatagttaagctgattaaattctcaaagaaccaaggatatttctgagaccttgtatctaagttctttcaggctgctataacaaaataccatacactcggcagctataaacaacacatttatccctcacacttctggaggctgcgatgcttaacatcaaggtgctggtagattcggtgtctgataagagcccatttcccgattccaagatgacacgttcttgctgtgtcttcacacggtgggtgaaaggggcagccgtctctctggattcttttataagggcactaatcccatttatctcccaaaggcccccacttcctaattccatcacatttgggattaggatttcagcataggaatttttggtggggtagagcacaaacattcagaccataggaccttggtaagcaccatcaggccaaattttattttattttttaaatatataatatgagagatcagaaaagatggtgtaccttcctttgtttcttttcaatagccttcatccactcttccaagccaggtcacttagaaagttgatgatgttctttattcctgaggtaagaataaaatgaaaggggtggattaaatctttctacttgacaccagaataagcgttctctgtatctcactgtcattgctggaatgagcactttaaatgctcatggttgattactgagggagagacgttttcatttttgttcctattggttttgaaatgaaagatagacagcaggtttaccaccttttgaagttgctgaataactcacttcattgccctcttgtcatctgagaacgtgctctgtcgtgtcagggaggtgcagggcagagtctccccaaccaggaatgacctcttctgttcactataccccaacatgcacttgaaaataaaaactgtgttgtgatggctcgtctgtggcagcagcttcttggcctgattgtagactgaggccagcttaggcagagtgggatggaggagttggagcaggaacaaacagaagatgaccttctgtgcagaaaccacattttcaacaagtctaagtcaacccagagttacgaactctgggtttcccttatgcttagctttgtattctagctcactggaaatagacatgcactaataccattgctctttttaaagatctgtgtaacagaaatggattccctgtcaaaatgtatttgtatttctgcctcatattatatattatctgcatcctcttgggtgacttgcctcacctcagttaggaaaagttttctcatctgtaaggtagggatggtggtgtttacctcatttgtctttgatggttaataataatcagtactagcaacattataatgattattattactatgttttatattaataatcaatactgggccaggtgcagtggctcatgcttatgatcccagtgctttgggaggctgaggcaggaggactgcttgaagccaggagttcgagttcagcctggacaacatagcgaaactctgtctctacaaaaaaaaatttttttttttaattagccagccatgatagtgaatgcctgtagtcctagctactcatgaggctgaggcaggaggattgcttgagcgcaggagtttgaggctgcggtgctatgattgtaccaggagtttgaagctggagtactatgattgtaccactgcactccagcccggatgacagcaaaattctgtctcttaaaaaaaaatcaatactggccgggtgtggtggctcacgcctgtagtctcagcactttgggtggccgaggtgggtggatcacgaggtcaggagattgagaccatcctggctaacacagacaaaccccatctctactaaaaatacaaaaaattagccagacgtggtggtgggcgcctgtagtcccagctactcgggaggctgaggcaggagtatggcgtgaacccagaaggcagaggttgcagtgagctgggatcatgcccctgcactccagcctgggtgacagagcgagactccatctcgaaaaaaaaataataataaaacaaaattaaaaaatcaatactaatttacttagttcagactatgtgtcaagtgctctaatgcccagaaataacctgtgagataggtattgtggttgatgttgttgtctctgtttttagagatgaagaaatgaatatctaaccacatttggatcaggttcatctaaaaccctaaagcctatgtaaaatacccaattgtttctgctgctggtgagttggtttttatgcttacatgtttctctcaccttccacaggaagctgtaatgtgaaatatgtaccaccagataaaataacggaagagggatttagattgaagggaaaaaagtaaacaagggagagtacatcaaatgaggggtaaatttagcaggcagcaactcaacaagcagcraaaatgatctgtaaagttgaaagaggtgagcctcagatttgcttctggtgttcctggtggctaaagcaatgtagaaaacacaagttgttgtagggttcacagtgtccattagattgtaaggaaagcaacaggtcagtaggaacagagtttttcctggtcctaggatctgaaaaaaaattcttacagaattcttacaaaatacactcccccataaaaaactgtaataagtacagaatgtttcagtagtacagttgttcagttatctatgtggtaggattcacggggaatccataagaaatgcagtaattaaaaccaaaacacttcagaaacccatctgatcctttgtgatgattgctggcatcagtggcaaggagaatagcagaggcttcttcaggtatgactgctgagcagttacctgagccgactgctgagcagttacctgagcccactcctgaacactgtcagtctttcatgtgtcagcctcaaagcaggtgtagcatattgttcaaaacatttgatctgcatgcctcaatgtcctcacttgtaaaataggtataaatagtgaagcagcgttgtttgtctggggtaatacccgaggttcgttgtcccacagccatggaaagctaggacgtggacacatcagagtgaggttaagagtggaagtttaatagacaaaagaaagagaagagctctctgcacagaaagggctcctggagaaaatgggttgccacttccgcagtgaaatgcagaaagtttaataaatgaacttaaggagggggtatgtgatttacacaggggatgaaagatcggttggaggaggcatgccatttgcaagtgtgcaaagaagctggccactccaccctaatcttttattatgcagatggttattctagctggctggtgccatgttgcctcgtccttattgtacacgtggtgacaaagaaaagggaagatggagcctccgtgttgaacatacctggcttccaggtagccttctcttggcgcagctgccagcattcacctgtacaagcttccagcttgtttatctatgtctgtagctcggtttttcaggctgctctttgttagaaaagaaatgatttgggggctacttttattaaaagggaagccttgccgaagactccttgtactgacactatctgcctaataatttctttctagctcctatatcaataataaaaatggtacctccctcataggaatgttgggaggataataagttaatgtagagaaagtacttagagcgttgcctggctcttaggaagcactgtgtatgttacctagcaatagtaggcatattactaggtgccacaggccttttgaattgctcatcaggagactagaacggcatctccctgttggattccagctgagcatcagttactggtggaagggggaaaggtctatatttaacaacttaacccaataggaacatctgtccaaagaatcaaaggccatcaaaaggaatgcaggagctacacatgctgttattttgtctgacagattttttcacaaggtaatacttgtagcacatagcaagggtctgtgatggagcagctacagccgtgccctctggctcctcatgtggaatgtgagctgagaggcccagtgtcctttatctcctgggatcttaaagcagataggagaggcacaaatggaatgaacattctatatccttccaagcaagagaccaagctcatgagggtaaaagcaacttaataaggacccatgcccatctattacatcagtccataaatcattctgatggcaggatgttatcactgagggctttagtttaacttgaaaaaaataaaaatttgtggttctgagagaggcggtgtttgtgcagaatcacaaaggatctgctaggtatgaagcttaaagcatttccctggaataaggagaggaaataaataagccataaagcatctcttgggctctgagctttcaggatctgatagaaagctagacctcttggttaattccaaaccagactccacctgctttcccagtctgaaggccacacccatcattctccctggtttatgaggtctctttggtggtagtcacgcataatgtgatttaaattgaatgagatcctttatggcctcttcctcagactcctctttgtttctctccaaccttgacaaggtctttttaacttcctctccattcttatcaaaccaggaagcaaggagggtgagtctcatatgtacctagtggagtctacctaggcagtgttcgtttattgaccgtccaacaatcttctggcgataggcagaggggccctgcttggtcaagtttgcccaagtcagacaggcatgggctttggaatcagagaagctggcttgaatttcaggtttgttactatttgactgtggctttgaataatttagtctcctctgaacctttttccccccttctctctgaaaccgcattggccaatatggtaaccactaaccacattgtggctgtttaaatgaaaaattaattaaaataaaaaattcagcacttggttgcattacccacatttcaagtgctccctgtggctcatggtgaacgtattgggcagaacccatctggcacatttccatcatcacggtaaatccgttggacaatgttgatctagtctaaaaccttgcagagttatcatgagatttatgtgagatagtatttgtgaaatacctcacaacaagagccctaaaattgtagctattttctcataagtacgaccatttagtcagcatttactttgtcccaggtacttagacattctcaatattaattctttgaaagccctgtgagtcggtatcagttttcccagtttacagctaggaaaagtgaaatatggcaaggttaagcagaataactgcaagattctccagcagttgcctggtgaggaggctgacatgcaaacccaggaaccaaccactacaaggcctggatctcaaaaccactgtggactgccacctcttctgaaggttttctttcccagaaaacgcagttttgtgatggaatgtgaatgcctactccatttcacatttctctacgtcctaatgtatctgtccagtgacaaacacagaaaagcccctggccaactcatgtttaaataaggtagagttaaagcttttatgatctggtccaaaatagctgtccctagctggtaataagacttgactatgccctatttgaagatgccaactccacagtataagatacagacatttgcagttaacttaggaagtgatggcgagagagagggcaagagagaaagggtaagaaataactacaactcacaattaaaataaaatcagctaccacttagctgtatccccatccaaggaatttctccacttcaatcagagtatttggcctgctgaactctctgacattccttatgaggggattaaactttattgaacagaatcactttaaaaattgaaataaaggaaaaatgtttaatgttagttgatttgaaagtaacttgaatctttgaaaaataggttgtgatattgattaatgttgaaacagcatgtgtgagggaaaatatactaaaaataacacacaagtgaaaaacatactctatctttgataagagagggaagtgtctctgtaagcctgtagtggcacaaacccctcagagtggggatctctgagccagaaatagcttctagcaatggtgatctccagcaaaagtgattctagactctcaaacagaatgccctctggcctctgcttaagtagtttcacaaaaggtgttcctgtccctttctagccttgctctctagtggcctaagagttgggctggatgagctaacgtgtccttgagctctaaggcgtgactgatgaattttaactaatatgagaattaaaattctgcccaccccccaaggaagttctcttatggtttgtttctttaccagaaaattctgttaccatttaactgcaaaacaaatagattcccaaaggagaaacattccagctttcttttatgatctcccctgcagggcccagatctggaggaggatttttctgacaatgggacttcacaatagcctggcctcaatctggtcagggagccatagcccactttcaggtcaggagggattcatgtgaaatttaaaactgctgttagggaaaaaagaatagacatgatgtgtctttactcaccagagggtagggttattatgtttgttagtaggaggtggtgagaaaccaaattagattgtgttttagttcctttcagctgattacctctcatccctcagatttgctctgtgaattttcatgggtggtttgaagcatttggtccaagaacctttcagccacagttgatgagctgattgtgggttttgtcgtgagcctggtctttagtgtcagctgggtttcattctaagatccccctggagaatttctattctgataattgcttctcttaacaactgatacgtttttattttatgagctggatgggcacctggtaaatattttttttcccttttttgcttttgttgctggggagcccagagccaagttgctatcctgctataactgtgtaggaccttatgacaggcatttcagagagctgccttttactctggccttagtttactattccactttatttttcttctctttgcccagatttctcatcctattttgaaaatgatttcttcacagtgtcaaacagtgctcctggttcaataggaattcccaggacgtgcctcaaagtcacccccaacctcgaagatgagtttgtatgcattacaaaaagggactcctgcctttaggcagacggcctcaaccagtgcccttgtaattgcacttctatccttggcagtcttccaaggacttccttgttgggttctgggcctgatgcagccccctcaatttgagcaacttcttgtttatttgttttacatattggcctgctgcaaaatcttttatttaaaaaaattcattttttcatttatttttaagttaatttgttagttttatggtgcttttgatgtgctaggtgctagaacacaaaggtaaacaagactgcttcaaggactctgccctcttggaggttgttgcattctggtgtgggagycagtcagtaaatcaaggatcagggagagcctctctgaggaggggataatgaagacaaggtctgtagaatgaagaggagcctgatgcaccaagggcagtagaaagagacttctgagcaagaggaactgcaagtgcaaaggccctgatgctagagagagcttgaggggttgcaggaaaagagtttttatggttgtgaacaagaaatagaaggaagaacagagagtggcatgagataaaatttgaaggatcccagatcgttcaggaccttttcggccaggtaaggagttgggattttatcctaaatatgataggaatccattgaatggttttaataaattcattcaaagtttaaagaatcaatctggctcctatgggcagcagaaaaagcagaagtgagaagatcaatccatgggagagataatattggtttgggccaaggtgggtggtgatggagagggagtaaagtgggtgtgtattcgaaatattatagaagaagacttgctactgaaagtgagaggaaaagatgagggaaaattaaggatgactcttagtttcaataagtgaccagatgctagtgacatttatggaactaaggaagtactgtgatggagaaacttggaggggagagaataaagagttcagttatggacatacttatttcaagacatcctagtggagatgtcaaatagcaaatatttgaactcacagaggagaggatggggctgctcttacaaatttgagggtcatcaggaaatagatgatattgtagacacaagattgaatgaaatctaggaacacagtggaaatgagaattcccagaaccaagtcctgaggactatgtaaaagttgagtacagaaggaaaaggcgggaaattagactaaggtaatggagcacaaccaggattggagagtgtttcaagaaggaaggaataatcaaactctcagagatcaactcaggtgaggaaaggaaggtgtgcactcctattttgcagcatgctggactggccagagaagttttagagggtgatagaaatggaagccagatagagttgctcagatggtatgaagagaggtaatggaaacagtgaatatttctaagatattatgtcctgaagaggatcagggacatggggtagtaagtggggtagtaagtaaccattgagaaggaaatataagattaaacgtcactgttgactatccatttgaggtttataatcttgaatttaaactaaagccagacagttccattttgtgattttcaccaccaagtttggtgataaagtatgcataaaatagacttcgttttttggccaagaaaacactaaatgagacatggaagttgcgaaccacctgtgagggagtgattgcaatattgggctgctttggaaataagctagataaggatggaagtaaaaggaggagggaactggtgcgtagtgagagattggcagggataatcaaaagggatatttgactttgcaaagaagtcaaatataggaggggagaactgtagagctaggggctagaaggaccagatggaattccaagagtgagatattaggaattgaaatgtccaggtggtaatggcaagctctaggggtactcaggggggaaggaagaaaagaattttgtatttaaggaggccaaggaagtgaaagttcactctcaaaataagttggaaacccattcttatttattatttgtatttcatgaatcatctcaaatccttacttggaattaggtgatagggtgcacataagaatgatagtggctgattctttgtggatctactctgtaaacaccattttacgatgtacttttgtacactgtgtaccaaaattcttcattgccgtcaggatattcattgggatatatttggaaatgggctaattcttatgtcttgattagttgataattctcatttttttagtcagtaacaacataagacccgccatggccttttgggtaatagctaatgcttttcaggyggcacggaagacccttgcaatgaaacaactcttctatacatgtcccatcacaccccctgtcattctcttgaagtgctctagccacacaaacaaatttctaatgtgaggtcaatagctgctcactctgcctggcatgaagattcatctaaagtatcaacttctgggttaagccttttctaaaaggttgaactgtccaaaaatgccattttgaagggtcaaaaaatgtcatatactggcactttcatattgttaataatttgctaccactattacaagtctgaaccatgcattgttggtagagctattacttgctgaattggaattctgtgttatgtgctttatgttcaccatctcatttaattccagcaataaacccaaaaggtaggtggaactacttccacttgttagacaaggattctgaaatttagaaagggtctttctgggagagagtacataacaaatggtggaactgggttttaactcctaaagcaaaaattataccatgccctttcctttggtcttattcatggcaatgacagcagtacagagcacacgcctgatacagagttggaatacataaatacatacagtaatacttcatctgccagaaaactacccaaattgaaggctgctttgttcagggacccctaggactactttatgatggcctagtatcttggcattggatttaccttgataaatgttgttgttcccctgtaatttagaaagataaattttaacaggtgaaactaagagtctgaacggcccttaaaaccttaatcctgtaattactatttatttgttttaaggcactgccttgatccatgtttgccagacaggttcctaattgctggcattgaaatgatctaggaagccagtttcttcagctcatgaaaagaacatgtagatttgttgaagtgtgaatgctaagtattggtgtaatgcagtcagagggcacaggacatctatgttcatttcccaaatgccctttttctttcattcacatggatttttcctctcattcctaagcacagtggtgctctaataagacaagaagtcagttggcaagtgtaacacagatgctctgatgccttgaatttggctaatattscttcttcattcaaacgtcattctgtagctttccctgagtttctggtgtcaaaattcaaagcaatggttgtcaaactttcgtgtgtgttcgaatcttctagagggcttgttggaacacagattgctgggtcacatccccccagactctgactcagtccatctggactggggcctcatattctgcaattcagtaaagctcccagctgatgttgatgctgctggtctagygactacactttagctctaggggctgttcaagatgcgctttacaggacaccaaatgaggttagataaaaaagcaaaaatctcagcaaatatctgaatgctagattttacagacaaaaaaaaaaaagaaaaaaaacacaaaacaaaaaccagtgacttaaaaaataatgtatctcctgatttttgacatcagtgggctagaacttgggaatccttcttccaagatattaaggaaactttcttctctatgactttcatgctttcagtcagtatgctttgttcttaaacctatcctagagcaagatgttttattaaattgatcagttttacaatacaaaattgaaagcaaagagttttcaaaatgaaaacattccataatacaataagaattgtggatattacatacaaaagagtgatttctaatttgtttagaagctcagcaatattttcatttttattagattcaaaatggtgtgagtcatgaagatcaacacatttctttttgacaggaatcctttgtgtttgaacccaactgcctcttcaaagtggatgagtttggcttctttctgacatggagaagtgaaggcaaggtatggcccaagaagagcaagttgttctttctgctttgtggtttaagccattttgtttctcaacaagtagactgagtgctgttgatgaaccctacccttattcattcattcaagatttttaaaaatgtgcctacatgtgccaggcattgaagtatacagtgatgattaaggacattatcctcatagattccagtctaggagcaatgtcaggcattaaaaaataagttacaagtcattgaatgttgtgaaagagaacactggattgtcaaagagcttaatttaatcttgggagttagaaagaaatctgccagaagaagagatgctcaagctgaaatctaaaaggtacattaaaagtgtgttcatctcattataccctgggacttaattcgatgtatggtacagtgtccacatttaatgaacaattgagctgaatttaagaaaagaattaaagttatataaaaattagcatttttctcacatttcatgtacacacatgtatttaatgattattaacaatgttttatatataaaagtaacagattttagaaacatttttatattcagcattgcacatatatatgtctatatgtatgtatatatatatatgtgaaatggaatacttggggtcttgattatttctgattatttacaataattattgttacatggttttaattccctcttcaagctgactgtaatcagcactgccttcatcatcagaaatttttgccaagcagtttgcctgtatcataggtatggcataatttaagctcattgctgtgttgtattctctctcttcaggaaggacaggtgctagaatgctccctcatcaacagtattcggtcgggagccataccaaaggtacctgtgattggtatttgcttttctaaacacggatttacttatattggaaatggccatggcttctagagataaaaaactcactctttgtatccaggctacttaaaacatttgatctcagttttgagaatagcatgtggttgctggttgtggtaatgtcacatttattcacatgaaacctctgtgactctcctctggtgagagagaggctttgtggacaagcagaccctaataaaaggctcttctatccaattgccatattccaggtcctccaataactacaatcaaaactctaaacaaagaccctcatatctagtttctaaatcaaaaatttaggccagacacagtggctcacacctcccagcactgtgggaggcagagggaggcagatcccttgagcccaggagtttgagaccagcctgggcaacatagtgcaaccctgtctctacaaaaattacaaaaattagggtgtkttagcatgtgcctgtagtctcaactactcaggaggctgcggtgggaggatccattgagcctgggaggcagatgttgcagtgagctgagaatgcaccactgttcaccagcctgggtgacagagcagagactctgtacctcccccaaccaaaaaatttgtaatacctttcttatcagttgatttcaaggaatatatagtgttacaaatttcacctctacaggttttagaataatgctaggtgtctgggcccttatgtttatttttacattaaatgtggtttctttttaccacgtttcttcctccatgctctgtgatgtaacttatttttttttctatctgtgtacctctatacaggatcccaaaatcttggctgctcttgaagctgttggaaaatcagaaaatgatctggaagggcggatagtttgtgtctgcagtggcacagatctagtgaacattagttttacctacatggtggctgaaaatccagaagtaactaaggtagcttcagttaaatggcctccttctcttccccaccatgtatatatgttgtgtgtttaattttatgcgtgctatatttttatatacttaaattgtatggtaatttaaaagttagcattgctttgctgacatgtttctgtagaaaatcagcaattaaaatacccttttagcatgtcactcctgtgggccaacaacccaaatacctactacgatatgttgtagggatactagtccagcacttctccaacttgagtgtataccagaatcccctgagctcttgttaaaatgcagattctgattcaataggtctgaggtggggacaagattctccttttctaacaagctccyaggtggcatggatactactcatctgacaactacagtttgagtgacaaaggtctagatcagtaccacccagtagaaatgcaawgtgagccacatatataatttaaattgttcttgtagctgggttttaaaagtaaaaagatacaggtaaaattaattttaataaaatattttatttaacccagtagacctaaaatattgtcattttaataggagatcaatataaaatttattagtgacatattttacattcttttgctcatactaagtcttagaaatctgatgtgtattttcaaatcagactaaccacattttaggtgttcagtagctgcatatggctaatggccaccatactgggtgggcagtacgggtctggatggttaagaaatccaaaccccccctcccaataagttattaaaatattgggttaagatcagtcttttaataccatatccagcataccattgccctggcaagtgagtctcaaagakacttctcraagaagtagaaagcctcgtaaatattttgtctgctaatcatgtgtttacagggtgattttacctctgtacagagctcccattatctttctgtaatgtgtgtgaaaaggactaagccttcactttccatggcagaaacatgggtttgggggaatggggaggcattttgtcttctcattaaccctataattggaaactcagtgtaggttgaatgagagagggttccaacaagtggaaactcagtgtaggttgaatttctaatatcattagaaatattgaattttagagctaacaggaaatgtacagggaagatcatttgaggacactgagattacaaaacttaaccatgaatccaggataacttatggcagaattgagttctgttgacccctaaaccatcmaagctcyattaccctcactcacaaagtatggtcctcattccagaagtacagacccctcctgggagcttgttacacatttgagtctcaggcccacccagatgttctgatcctgaatcttcatttttgacaagatgctccaggtgactcggatgtgtggtgaagtttgagaactcctgttttgtagctctggaggcagaaatggatgctcgatgtcacataagagtgtttggttctgtccttattgtggtggttttatgctatcgttcaggtcacctcactttgggagaacagattttgcagtgccttcaagttcttttattactcttctgagatcaactccttctctaattaccaattcatattacaagaaacaggatgatgcagtatgagctcaagtattggggctttggggccacattgcctgggttcaaatccttgctygtccccttcccagctatgtgaagcagatatacgctggacctctctgtgcctcattttcttcatctgtaaaatgggaacagtactagaatatctgctcttaggatgattgtgaggcttacatgagttatgacgtgggaagcactttgtgtactgcctttcttattgaaagcccttaatatgtgttagctattaggatgacagaggccaagaattttagagttcgaaatggaccttaggaagggcttctcacctcatttttcagatgagaaaaatgaagctagagaggtaaaggaactctgagaccacacagcaagctgggccagagtccaacctaaaaccaggtcttctcatgccctatatgctgcacccactttgcyctgtgccctgagcaaatacagtcctggggagatggctcaaatcagtaaatcccataatgtttttgctttccataatttgattgctgttagtcttggcccattctaagaaccacgttctgaaacatacccttgagtagattatggatgtgtactgttggcccttgaacaatgtgggggttagrgctaccatacccctgtgcagtcgaaaatccatgtataacttttgactcccccaaaacttaatagcctactgttaactgaaagacttatgataatattaacagtcaattcacatactttttgtatggtatatgtattacctattgtattcttacaataaagtaagctagagaaaaagcaaatgttaataagaaaatcataaggaagaaaaaatatattattcatgaaktgaaagtggatcatcataaaagtstttatcctcatcatcctcackttgagtaagcagaggaggaagaagaggaagaggttggtcttggtgtctcaggggtggcagaggtggaggaggtggaagtggagtcaggagaggcaggcacattggtgtaacttttactgaaaaaaaatccatgtataagtgggcccacatagttcaaacccatgttgttccatgaccagtgatatatgtttgagggttgggggtggggggatgtatacttcaagggaagatttgaaggttttctcctagtattattgccattgaaatttaagagcagctagccagttaagaactaaaaaataattctgtattggattttttattcaaactcaatactatttgagcctgctcttactgaagaaactaagtgtttcagcttctgggaactattacatygaatttcattaatagcataatatataaataaatataaatctcattgtccaaactggacagtgcattgtcctttcggttgattgacactggagaaaatattgagtacatttttccaccaaatatacctgcatgtggatactcttgcccccttccttatctcaaaacttaaaataaccatatttaccaccttcagcattgacaacattttctccatcaccaccgttttatttctattcctctatatgtgtttctattcctaatagaacacacaagccatcaaagtgaaagtctttatatgaaatacacatagatataattacctcagttcgaaatgatggcaggatacataaatcaaattgggccaatgagaaatgtagagatttcccagggtacrtgaaatagtgtttgtgactcactgagtggttctactcaaacgtgagtatagcctaggagcctagaatcagggggccatgaaatatactaacagccctcttacttagcccatgcaatgagaaggtgcatttttggtcagtttatcacaaaagtcaattcgagcaagtaatcattttttaaaattaattcatatataccttaaacactgtaacttaaggcatataaatgttgttctattgttgactaatcttttaatgttagggacaagccttttcattaattgtggatctgttgmgtggsttttatgttttgggtttttttttttttttccccctgtactttactctgaatgcctcagwtagccagtttggtttctttaaggtggatctgagactaaggacactcattgggcagagtgcaatggaatgcaaaatcctacagttctgtgacttttttccctaatcttttagttatcttgtctacayggaatttgagaaaaatatttttrgcaacttgcctttaaagaaatcttcccaaaatattcagctagagaaacaacaatgccctttctttccacaagatcgtgtcattggtttacgcaatttttatgacaactgacaataaataggtttgaaaacaaaagtaacccatggtagacatgtaaggtgagagtaaaagagtacaaaatattggaaagtggcttgctggctgggagagtccagcactccctgggcaatctgtgtattttgtttgtcttataaacacctgatgagtcttggtctgacaagtgaaatgtaagttaagtgagtttctagtacagaacttgcttatgagtatcctatgagattcatgagtctttttttttttaattcctaggctcttattacacttaagatctgaccatttggaataattcacttaacccaacatttaatctaggcaaaagggtaaactttgaacttagtgtcttttataccaaggaccatgttccatgtggaggaagctttcctgactttcagcaagccattttcccttctgtattcttctacttctcaaagagggtctctgatagtttttttttcatattcaagtgggtgctttaagagtcaataaaatattatctgaaayctgagtttctcagggttgaattttaaataaatacaaaatactttccagtgcatatgactctgaaaatatgattgtgcttttttcagtaaaagataacagcattgttaagagacaccttggtagctcaccttgtcttttcttcagcttctctctctgctttgagagtaaatacgtttgtgttgccactcttacctatttaggagatttgtgctcagttctatatacctttctcctctaccggtaagtcccaaatcaaagctttcaactcttctcacctgcttctcccacagtcattttcatctcaacaaatgtgctctcagttgcagagaccattctcagttgcagagaccatgaacaccttcctcttgtgtcctatgttagtctgttcacaaatactgtttgctctaccctcagcaggtatccagaatccagctgctcctcaccaacgtcatcacgacacagtggcccaggccaatggtccaggccaatatcatttcttccctattgtgccccaagaggtatctaactggtctcttttccttagccttgcccattttggtctagtctaaaaacagcagctggagggatgtttttaaaatgtaattcagatcacatcactccactgctcagaaccctccaaggccctgctagatatcatccccacctcccttcccctttctaccttaatctctctctttcctcctacgcattttcttccagcctctgggacttggcatttgctgttccttctgtctgtatcrtgctctttcccagttacacacagagctttctcccccacagccctcacgtgtctgctggaaaattgycttagcaggagctccccatttcaccagccttcggcacttcctcactccttttcctgctctgtgtttcttcttagcacgacttacttaccataatatccatttattcatttattttcttcctctgtctgcaggacrgcactgttctgttcactgctgtatctgcaacatctagaactgtcagtgcccgacacttagtgagtgctcaataaaaacctattctattgaggtatttatgttgactaaatgaattccaacccaagtgataaaggtgtataaaccttaatgttgtgcaactcaagtttgtacagttcagttgttagaacagmcaggaagatgatcctttgacaacaagactgagaaaatgtgattcaatgatagtctaaaggaaagacagaactctgggatcccgtgtgttatttttagagccacatttcaggatgtaatagcgctgctgctaagaatccatgacgagactggaggttttgaccctggtgtcctggcctctttccagtttggatcattatgtcctgcttacctaaatccttcctgtcgttacagttagagaatttagctttcatttcctctcctaaacaactgcctgttaaaaagaattactaacaaattgctgtcatatttaccccaaacctagtacacctttcgctaataggcgagtcttatacatcataaagcttaaaacagttaagaataaatgcagcctactaaaaaaaaacaaaaacaaaaaatttacccagtgtgatggcagatgcctgtaatcccagctacaccagaggctgagtcaggagaactgcttgaacccaggaggtggaggttgcagtgagccgagattgcaccactgcactccagcctgggcgacaagagtgaaactccatctcaaaaaaagaataaatacagccaaatgaaggtattttcccatttttttctaaactgaaataaagctcttttttttttcctggaatcattctcatctttttgctcactgttttacaaggcactatagaaataattgaatatgagcattctaataagttaatttcattagaaaagcaactttagttcctctcatgttttcttttgttttttcctcgctcagaatacaactagcttggaaggattttggtgtctagcaaagttgaaggcagttcagatgtctttcattaataagttacagctggcactgcacagcaaactgaaatcacagtcactagacgtaagatggaaatgcaggcctcattcaacatctccataaataaatctgttattctataccaagttgaattttcctttgattacaaaaaataagctgttattatgacgttcaaaatgcaaatattgggattgagtttagaccagactgctcattatactttatgcaggtttgtaaatatttggcaaacttcataaattatgccttgtaatcaagtcatcaaataagcatgtaaataactactatagaaattaaattacaaaaatattatgtattcttttgtgtacaaaaagataaagtcaggttatttgttaccagtaataaaatattattttaacaaattgggctgaaagtcaaaattgctttgctaaacttgaattgtgttgagtgaaagacttactgcaatggttccagaagaaggaatttattctttgtttcactaaaaaaaaaattgattctctatttaaattgagtcctcctggctttgctaacatcctgcaaagcctccaagccctgcaaccagttcctctactgatattyaaccacagcattaccccaagggatcagaggcttcagcctcgtctggggacttcttagaaakgctattgcatttcttaaaattcagttttaattatactgtataggccagtggctctcaatacctgagaacttattagagatgcagattcccaggccctgccccaccctactgaatcagaaagctaggatttcagcggccttccaagtgattcttatgcacactcaagttagagaatcactgctaagcagaaaagctcaatcactaacatttatatcctgctttacttgcagaggccttaaagaacttacattaacttagtggtctgatgcccaggctcaactgagctgatgcctgctgaatactaaagcagctaaattgtaaatctgaactgcctattgatcacccaaaccccagtatactaattaataaaagcttcttcaccacattgcttcaacagtttttgaggctcaaatgtgggatgagtgtgtaggtctctgtgttaatttttgttttgttttgggtttctttaacgtttccaagactgaaagttgacattttcttgttaattgtttttcttgaagctcttctgagttcattggaaacaawtcaatgagggggggcattaagctgtccggagtgcagagctgtgaatcagaacaaataattgagtgcatattcttaagtttaaatgtcccatcccacctaagagttttctttttgccaaataaggataatgggttttattgttatttctattgctgggttgagtttacggaccaccagtctctgccttacatgggctgtggtcatcagagaatctgtggagctggtgaaatcagtctcctggggcctcccatgaccacctttttcctctgtggctccttcttccttgcctgccagttctcatttgctcttgcaagaccatctctcctagcagctgctacctcagtgtctcatccgtgatggcgctctctgaactctgaattatttatttgtgcatcaccaaaagtgatagttcctttagaccagattttgtgaactcagatgcctgtgggagccagggaaatgatgtgaatagctgaaaacatgtcaggcaaagacaaatacgggagggtgtggactttagcaagttggagtgcacatacgctgttgaggggggcactttcacttatttccagctagttttccaactaccaaaacatgggcctgaggtttctagattgttttcatgtccatttaatactaacgtggattttttacatgaaatctcttgatattaaaatgttggcaactcattttttaaacattgtgcaaaatgacaaacatgtctgtggatcatttagaaccatagctatagacatcaggcaccatgtagcattaacacacttgcactaaagtgaatgctaatattgacttattgtgttcaccttattggcattttaaatgaaagatacctgtttgttcctttatttcttcattcagctattcatccaggaatatttttttgatgaaacctgaacttggacaaatcatttcaattatattaatctttttaatcctcatttgttaaagaaaggaattgcaccatgtgtcctttgaagtcactttctcttataagacttaaggaaggactggctgggcatggtggctcacacctgtaatcccagcagtttgggaggctgaggcaggtggatcatgaggtcaagagatcgagaccatcctggctaacatggtgaaaccctgtctctactaaatacaaaaattagccaggcgtggtggcccatgcctgtagttccagctactcaggagactgaggcaggagaatcgcttgaacccaagaggtggaggttgtagtgagccaagatcacgccactgcactccagcgtggcaacagagtgagactccatctcaaaaacaaaacaaacaaacaaaaaaacttaaggaagcactctctttgcaaaataaagtgtaccaggagccaaggatggtccaggttagttgctttgacaggacacttgtgtacacatggaaatccctagataagcttaacctggactacatcatcatgacaccaggagtcagctactaggataggaggctttgtggttggagaggtgacagaagtcattctgggtacttcctgtggacattaaaggttgagagatcctgagatagaatgcaagaaaatcagttgttctcggcttcaatcagttacacaagaaggaaagatctgagaaacattcagtgtggaatccagaggttttgttcctgggtaaagttagagaagctaaaatagagaccagattctgattctgattaactgggagtacgatgatacagctaatcagaaattgagggtctggttactttggatcagggagaaaaaggaacaatgaatttgtttaaatttttttctctgaggaacctgttagttgcatgacctgctatgggtgatgcaataggacagagatcatatactacttaggatccttaggggcttgtccatggggygagctctgttctgtctctgtggcacatctctaggcctctgaaatcctgaaaaggtctacrtttgtttgtttgtttgtttgtttttgaaactccctactttcataaggaattaagtgtggatttttagctggcatttttcttagtgctggacttacttaaaagctcctggtcaaaatgattcttcaggaacatgcagctgaagctagaggatatttgctgttgttttcggggaattttgtcacctgtatcagtgaagttatttctttggatgagagtatcaaagatgaaagaggcctcaagcctccgcttagctcccaggttctctgcagctgcactgaccatgttgacaaggtcatttaaacatttgcatggacagtgtgtttttatactgttgactggtatttcctgaatgctaaaggaatgttgctcatgatagaggatgtagttgcatgacattctatgcagaaagtacaggatagtaaaaaaaaaaaaagaaaagaaaagaaaaagaaactaaaaatcccctagagtgtatttccccttctgtgtcttttcttaattcaagtgaaatttatgtaacataaaattaaccattttaaagtgaacaattcagtgccatttagtacattcaccatgttgagcaagcaccacttctacctactttcaaaacattttcatcaccctcaaaggaaactgcatgcccaataagcgggttcctccccatcccctctccccacagcgctgataaccactctaatgagtctttttattccccacacactttcctttttatatgcagttggactcatgctgtttaatatactgcattttattatatgaattttcctgtttaaattaaaactttttcttaggtttcaatgtaaccgcaaatccccatgatctgtgaggtggattttcatgggcgctcagctcttgctgttttagaaatcatcyagcctccttcacagttgtgtttgaaatgctgtgctcttcatggggcacatggttttcagtgctggagcctttctcaccactgcatttcatgaacttgacaggtttcataagaagagactgtagacccagcccagagaagctcattttgtcctagttgcaagtgttatcaaatgactccaccaagggaatgcaaaatgaattactctaattgcactagaagcataatgtgaagtttgtatttcaccttttggcccctgggagagaaaaatgtcactgactttaaattgcttttccattttccacatagccccagtttccagtgccagcaaaaaattgccattggaaacataatgtatgctgacatgggcctacatgtatttgtatgttttctcatctgtgtggcaaaattaaaaactggatggcatgaagaagtgggcagaatcccttgtattacatgagactttgttgcctccaagctctatgatctggagccagtaatttaatgatcataatctggggtcggcaggtgcaggccatgggctgaacacaacccttagcctaattttgtatgtcctgtgaactaagaatggcttttacatttttgaagcgatgtttaaaaaataaattwaaaaaaaaaacaggaaaactagacaacatggaactatgtgtgcccctgaagcctaaaatatttattatctggctcttaatggaaaagatttgctggtctctaataataatactaataatagtagcagcagcagcaggaaaatagtttatattgtatgtcagacactgttcaaagtgcttgatatgtattatctcatttaactctcacaagtctgtgggataggtattatgattatcctcattttacaaataaagatgcccagagaggttgagtaacttgacttttcaaggccatacgtccagtaagtggtgttttgagcccaggcagtggctctctctagtgctctagatcctgaattctaccaccaccctgtgctgcaattcacagttggcttctttttctttttctctttttttttctgaggcagagtctcactctgtcccccaaggctgtaatacagtggtgtgttctcagctcaccacaacctctgcctcccgggttcaagttattcttgtgccttggcctcccaagtacctgggattacaggtgcatgccaccacgcccagctaattattgtatttttagtagagaccgggtttcaccatgttgaccaggctggtctcaaactcctggcctcaagtgatccacccacctcggcctcccaaagtgttgggttacaggcgtgagccaccgtgcacagccagttggctgatttagcttatctgtataaaaactggggcagggagtsgggggaacagcctctttcacctgtaacactgtgtgatgttaatgtactttttaggcaaatgttttaagatcattatctgtgggagctatagtcatacagtagtacttcccgaattagtggcctgaaaaaaggattccttaaaaaagtccacatataaagggggttctttggtcagctaagcatgagaaagcctttagacaggtttctttatggtagtgctttcagaagaagtatttcttttttttttttttggaggagctgggtctcagatatatttgagtcttagtgctttactctttttttttaagttttagggtacatatgcacaacgtgcaggttagttacatatgtatacatgtgccatgttggtgtgctgcacccatcaacagaagaagtattattcttatgtggatctcagcaaggaagaaagctattcagctgtttcctaaactttttttttaattttttgatgagacaccattaacatctttcagaaccagtgtgrcactgaataaaagtcagtaaattatatcatagaggcattattcagctcaatatttttctagaagtatcaaaacaatgatgtaatctaaggattcatttattcatatttaccataaatattctatttattttccctgtttttccacttccacttgtcttcactcctcactgttttctgctgtgtgtggggagactttaccttaaaagayagagaaccaggtaatgaaactcaagcccaccgatttagattccttttagtagctcttatattgaaagtcctatttagtttatagaattacctatagatttgatttgcttgaactaaattggtggatgctgcctagttaagagttagacaaaggcttcttgattgattatattgatctcagactaagcaggtatgattgtcatcaagttgaaatactatttactttggcatgacttaatttgccaacattgtcaacaggtacctgtcaggaagaatgtgaccgataaatacaggccatcaactaaagaaacaactctatgaacaccttttaattcaccagctgtttactcatcccataccaacagaatttcacaaatttgactgagttgagtccaaaagtaatgctgtcaaaaaactgatggttgctgactggcttaagatgatgcttttggttttctcaacattttaaaatccctccattcttctagagctttccatttggatgccaaataatgttacataaaataaaccaaaaatcttattttatttttgaaagatttctggggatgtaggaatgtagttggtctgtggactttcaggcactaaagaacatcatgtgttgtatatctaaatcagaagcacaagtgaatataggcattaatgtaagtatactctatgtatacatttttccctcctgatcttttgtgtccataacagtatatttattgtagtagatatttggaaatagatgcagttatttgtgacaagattctatagatccaataggacattgctacagggtatctattaatatatagaatcaggcttaggcaatgcaaaaattgtgtctaaggaatgctaacaaagccatttggtatggaagtttgggactgcagcttctgaacagcacaggtgtcctcttttttcttgtgactatttagaggctctttttgacctaactggccagtgttgtcaagataaccagcaaggctgatagactgttttgactctctgggagtgactaaattaattttgtctaggaatgtataaatattatcctcacccattcaattatctctttcaaacatagccacccatactcatagatggcagcttatttcttgcacaaatactcattcaccatgctctgagggtaatttaagaatcatatgatttaattttgtctaggaatgtataaatattatcctcacccattcagttctatctttcaaatacagcctcccatgctaatagatggcagcttcttttttgctcacatactcattcagcatgctctgagggtgatttaaaaatcatatgacacttaatatatttcttctttcactttcatcaattttactctgtagcttcagactgtcaagaaaaagaggccccagttgctctctttttccccctttcaattcttctcttttagaatttgaaaactttatgaggattattattgacttcccaagggcttttgaaattaatgttgggttgtctttttaatttttgtgggggcaaaagtcctgttgctttttagccaccagtttcagaagtaggttgctgtcagtcattatcacaggctcactgatgtagctttctatcctgggtttatcaactggacttgtgtaggatggcagcttagctcctttattatgcaggaaagtcttcactgtcttttttcttgcactcatctttcttgcagcaacagttcatggtgaattgccctcttgtcccatgggcatgtgggcgtttccaacactgacattgatatcttgtgacactaacacttagtacctgcacttgtctgtccttggtggagccaggagaaatcagctgacatgaaagagagaacttgtttaatttttacttcttaacatgatttagaagttggtctgttatacaaacaaacattagtggttttgttcctttttaattttaggctggatttagtgtcctagatgaatacctttgaaagataaaatgttcatttgtcaagtcctgcctgtaccatcagcttctccactctccacctctgccactggggttttataattcccaggcctcagacctggaccaaatgctgtgggaatggggactcaggctttgggaacgctggcccttagcctctggctcctcctgctgctctgctggctctggccttggtccttaggtctggactggacagttggtggcccaagtcatgttctgatataccccaattttaagaagtagacctctgtctggtttctgtactggcccaagtcatgttctgatcatgtaccccaattctaaaaagtagacctgtgtctggtttctgtactgaatcatctggtaagagttatcccaagaagcccagatcttccagaccagaactatctcaagcaggaggagctgtaacttccaacagtcttcctctgggccagctccctgctgcctgatgagatcctggaaatcaccagctcctgaatttcctgtggctgtgaaatatcctcttacccaacctccctrcagctgcctgcattgcttttatgttgcctgtaactttctttcaaatacttcaacacatgcagtggggtgtgtgtgaattttcatccaaaaccagggaatgagaatttaaaattttaaatgctcaccctaaaggtagttagttagcgtttgaaaaatttgaatcaaagcttaaagatcaatcattatatataaattatagctcaataaaattaattcaaaataaaataaaacaagcctaccctccagtggccacctacacacccccttcagttaattttctctctcattagcaccaggtgctctgatactagcctcctggagtggtttctacatgatagacacctggaggcttgttaaaatgcagattactgggccctgcccccaagttgctgattctgtagatttgggatagggcctgagaatgggcacttccggtaaattcctatgagatgctcaacccgctgatcaagggaaccacacttgagaacctctggcataatgcagactggaactaccttttctttggtggagttcttcatggtattcaagatatgcaatttgtgtagaaataaggtacaagccctggtatccttgtgagcctagggcacaggaatctggcaagcccaaatgcctgcctggtatctgttggaagcttgttagaaatgcagaatctcagtgcagatgccaggcttactaaatccaactctgtggttcacaaatgcccccaggtgatccaaatgcacattaaagtttgagaaacacctgcccaaaccaaatttagttcacatcatctagttcaattgtcctcaactataggttcacgttagagttacctgcagtgtttaaaaaagcagattgaaagacagcccaagtacattctaattattagttagaatctctagggtgagacccaggcttctgaaatgtcttataattcccccaggtgattctaatgtaccacaggtgctgggaactaccagtctagtctctctaagtgctatccgcatagttcttttaacagtgtactagctggaaatgtcttccctttagcctgccctcaaagttaaatactgacaatttaatgccaactaaaccttctcctaattcaaatgaaatgatttcatttgccatgctttttaaaatttttttattttttatattttgtattattattattattatacttcacgttttagggtacatgtgcacaatgtgcaggttagttacatatgtatacatgtaccatgctggtgtgctgcacccattaactcgtcatttagcattaggtatatctcctaatgctgtccctcccccatcccctgaccccacaacagtccccagagtgtgatgtcccccttcctgtgtccatgtgttctcattgttcaattcccatctatgagtgagaacattcggtgtttggttttttttgtccttgtgatagtttactgagaatgatgatttccaatttcatccatgtccctacaaaggacatgaactcatcattttttatggctgcatagtattccatggtgtatatgtgccacattttcttaatccagtctatcattgttggacatttgggttggttccaagtctttgctattgtgaatagtgccgcaataaacatatgtgtgcatgtgtctttatagcagcatgatttatagtcctttgggtatatacccagtaatgggatggctgggtcaaatggtatttctagttctagatccctgaggaatcaccacactgacttccacaatggttgaactagtccacagtcccaccaacagtgcaaaagtgttcccacccctccacatcctctccagcacctgttgtttcctgactgtttaatgattgccattctaactggtgtgagatggtatctcattgtggttttgatttgcatttctctgatggccagtgatgatgaacattttttcatgtgtcttttggctgcataaatgtcttcttttgagaagtgtttgttcatatcctttgcccactttttgatggggttgtttttttcttgtaaatttgtttgagttcattgtagattctggatattagccctttgtcagatgagtaggttgcgaaaattttctcccattttgtaggttgcctgttcactctgatggtagtttcttttgctgtgcagaagctctttagtttaattagatcccatttgtcaattttgccatgtttttatagactcataagaggaaacatgttggtggtgatttatctacagtccctatttattttagaatctgaggcactggctatatttcatggcaagctaaaactcaaatgccttcatgaaactaaatttctagcttaagatgaaggtgtagttcctgcactgaatagccttcatctgtagatttgtgaaatgttgcagttttacatctaagcaccttataaggaattctatcttagacaagattagatcctgtggcaatctttatttgaaaagcttcatagtttgctccaagtgcatggaaatgtgtcttatttctcttgaatgccctttaggtcttaacagaattcacagtgccaaggagtcaaaaactatatttcaaattatatacattcctgacatattatttgagcagattaaaactgatggatagagcaatttaggcaccttgaaagtagctacttgaaaaatgccaactttttcttatctccattcacttaaacaaaaatgggccaggtgcagtggctcatgcctgtaatcccagcactttaggaggccgaagcagatacatagcttgagcccaggagtttgagaccaacctgggcaacatggccagaccccatctctgcaaaaaataccaaaattggctgggtgtggtggctcacacttgtggtctcagcttctgggaggctgaggtgggaaaatcatctggacccagggaggtcaaggcagcagtgagccttgattgtggccactgcactccagcctgggcaacagaacaaaaccctgtctcaaaacaaatagaaaagtaaaacaagaaaacaacaaaattaattgatctagatttgtgagttgtcgataccaagaagttcccatgttttaaatatttcagatggccccgtcattgattattctcacagctcagatatagggaagatgaaagctgctgcctatagcatcttgcatcctcttgcttccacatacaagaaatgtgaactkcaatcccctaaaaaggtcagagtttccattctrgtgaacacatttgttcagcccaggtggggtgggacatgacaaaaaccaagagtgggtctagaaccatggggctcttcccagggctatcactatgagatagaatatcctgtgtgtagtcactctcagaaacagcagctcccttaggaaactgctgtgtcctgaatgcttgtgtcccaccaaaattaataaactgaaatcctaccctctaaggtgatggcattagaggatggggcctttgggaggtgattaggtcatgagtgtggagccctcaggaagaggattagtgtccttattttaaaaaggtaccagatagcccccttgccctttccactgcatgaggacatagctagaaggcactacctatgaactagaaagctgccactgaatctgttggcgccttgatcttggattctccagcccccagaactgtgagaaataaatttctgttgcttataagctacccatatattgtattttgttgtgtgtcaaacaaagacaaaaaccaaactcacatcttatatgggcagtggaaggagaactccaagttgaggggggctgctcttttagacctatgattctcaaattctaatgtgcacaccagtcatctggggatcatgctaaaatgcagattctgattccatggttctgggatgagacctgggactctgcattcctaacaagctcccagatgatgttgatgctgttggtcttggggccctttgagtagtaagggtttgcaacagtgcttcttaaaygtgtgtgtgcaaaagaatcacagggaaggctgattaaaacgtggattcctatttcccatcctgaagattgattcagccggaggcctgataatttgcattttaacaagttcccaggtgatcctgatgctgctggtccccagactacattttaataacaagcctctagttaacttttgaacaacttaattaagataccttcactagtagcctcttctgtgaaaacagagagccaaacatcaaaagatgaaggaggatgctactgagtccctttggagaaaattacatcacaaacttggagagtgccacagggtctctgttcatttttccattgacaatatgcttctttgactaaagacgaaaaataattcttcaggatcaaaacctagagataagattggaaccctaagattggaagtagtgctgcctgatgaataataggactagttattttaggatgacgggccagcctgtgcctagtgaaagcttagaaatgccaatagcagactgagcacggtggctcacgcctgtarttccagcactttgggaggccaaggcggacagatcatctgaggtcaggagttcaacacaccctggccgacatggtcaaaccccctctctactaagagtacaaaaaaaaaattagccgagagtggtggtgggcacccacaatcccatctactcatgaggctgaggaaggagaatcgcttgaacctgggaggtagaggttgcagtgaaccgagatcccaccactgcactccaacctgggcgacagagcaagactccatctcaaaaaaacaacaaaaaaaggaaataccgaaagcaaaatgttattggtggccaattcttaatatacgtcatgagatttggggtgatgtttacttcttactgtgtatttctttgctttacactttcctatgaagcatatttaaatattgttttcataaactgggggaaaaaccctaaccaatatttttaaaagaaaaaagtaaaatatatgctcagtgtaagttcatagtatttttggtttgtgtttgttgtatctgtgtctctctacgtttgtattttcatgggaaagggattatttttgtctatgtcagtcctaatgttcccggggcaaaggtgatagatgggtaagagcaaggtctaaacatatgcctggaagttggacagggcctggggtggtgaaaataaatttaaggagtcccagaggagaggtcaaaagctccaggagagaattagaggcagcttctctttctctccttgccctccaaacaattcagcacaagccctcaagtcccttgaagagtctttctttcccccttcttcttagaagggctgaaacacactttaagttaacttaggaatggttagaaaaggttaaaaaaatgggagaacagtagcaattaacaagctgctagggaaacagggaaaccgtgctgatccgaacatcagagccgacctcctgtggtctggttccctagcacccaggctcaggcttcggcttggggtggccggaccagaaggaaagtgccccgtgtggcagaagtcatctcaggagcgtgtcgccatccagccaatgacttgtgttccaaggactggaaaatgcgcttcctggacactatgtagatgattaccacacgagcttattttcagcaattcaagaaagaatccaattcgtggtttattgcttctgttagtctggaaatggtcaaacaagttgataggcatctagttcacgcctggcgtaactttccaacaaaactccagggctctactgacacctgctggcatttcatctactttatgttaaaaaaamcccaacaagacaaagaatcattaatatttttcctgcagtcctttgcccttgttatgttacttgtactttacctgaacgataatagaaggggcctttaccatgtcgtgaggagagaagtgtgggcaagccattgggtgaaaataaaaatccccaacacgaagaatgtaccacagagctcttgttgcctgtctgccctgcaccagctgctctgtgaccttaggcaaggccattgacctcactttcatcattgcaagaagaaagaggcagcaaccttccctcccagttccctttagggcttctgaggatgctggtggcatttcctactaactaaagcatgggccctgtcactggagtgatggccttaaaggtcactctcactgacctttccatcacaataaacaagattccttgccagcgttgtatgttcaaaagatgaatgaaagttatttaagcctcttcaaagtgcaccatctctgtaatttatttcgacaaacaactaaattagaatgatcagaaaaagcccagtgaacagtctcagaaattgtccactttttttttttttgtctaggaarctatggactttgttttgtgttttagaacatgtagtaagcctgcaggttgagaaaatgcatcccagttaatgccaacccaattatttgtgctttttctgtctattcttgggaaactctgtgtgggcctgtggtttgttaggtcaataacaggatatttgatagtctgcagggagttatagtccatatttagcctgacagaggaagtgagttctgctgatgaaaaataattgaggcatttctttaattctactatttcatttcttcatcttccttcagaatcctgaccccactatgatgcttgctgaggctttcgatgctatttacagctctgcttttgctagtcacaaaagaaaatttacctcttataacccctaagtcttccctcagaaaacygttaggtgtgaccaggatcagcaaaaactgttagattcacatccattagtttggctactacttaaaaaaagaaacaaacaaacaaaaaaacccagaaaatatcaagtgttgttgaggatgtagacaaattagaaccctgagcaaaagggttcccttgttgcatttgcagtcctttgttggtgggggaaaaatggtatggccacgatgaaaaacagtatggtatttcctttaaaaattaaaaaatagaattactatatgatccagaagttccacatctggttatttatccataaataagaattgaaagcagtaacttatttgtgtatcaatattcatagcagacatgcaattcacaatggacagggagtccatcagaggtgaatggatgagtgtattattcagcctttaaaagggaagaaattccgacacatggtagagcatggatgaactttgaggactttatgctaagtgaagaaagccagtcacaaaatgacaaattctgtatggttccatttatatgaggcacctagcatagtcagaatcacagagacagaaaggagaatggtattaatatttatcaatggctgggaggagggggagatggggagttatttaatggatatggagtttcagttttgcaagatgaaaagagttctggagatggctggttatgttggttgcataacaacatgaatgtacttactgccactgaatttttcatttaaaaatggtgaaggtgataaatgttatgttatgtccatttttaacacaattaaaattaaaagaaaggttaaacagcaaaaaacaaaacaaaaccatactctgttagaacgcagtcatcacctttgcccttacagagattaaattgcttgactttttaaaacctggttctactgggcagtgctgtccaacagtcccatctgtgatgatggaaattatctgcactgtctgagccatcaaccccatgttgatgtttaagcatgtaaaatgtgattagtgcaaatgagacactgaactttatatttattaaatttaaatagccatatgtgtctagtggataccatactagacagtgcatatagagtatacgtctatattactatctattccaagatakttttccttcctcagcactaagccgcaaatctaagcagtcaggctgtaaacctaagaaggtaaggaatcagcttatgtgtgggccaccgttctatttaacccaaatgtcaatttgctacgaagtgttttgccgagggtatgattcttctatggcattcattggcatcagtttttggacccaagggcagagttggccttaattcatgggctgagcttttctagtaaatgcccttttagagacccaaattcctctactgccatgcacaatttcccttcacttgtccttgtaaaacagtggagtgatggtatgaactacamgtgaggtccaagtccttatacagaaattatgtgagcacatcgctgtttgctctgatcaccctggcaatgaaagaatgtttttctttttaaggctttgctggaaaacataggtaagataagtaacaaactcttagattgaaaggatcacacaataaaattgatgaacccctattcatttatcctctaaagtgaaaatagttaaatatgtcatgtattttataatgctggttggaaataattaagattgccagcaactgaaaaagggcttatatttaaacaagctgcaaatagaaagcttcacaagtcagtcagtgggcaacattcctttgtggcagcccagagtttaatggcacaatagatggcacatttgtcttcatggaaagaatgaaagctgtttattaaagaataaaatatgagcctgcaaaatatagatggctgtgtgacaggaaagggacaaaagaagagtttgtgtttttattacacaaaatggatacaatctatctaataaaaactgctctatttgactccagcagatttgctcaccaagaatattttttctttctctttcagcaatgggtagaaggcctgagatcaatcatacacaacttcagggccaacaacgtcagtccaatgacatgcctcaagaaacagtgagtgttgtttgcattactcgtttttcttggcagttatcaaacaaatggtcagatgaagagatgaaggctaggtggttccttcctccaaattcctgcttgcctttccctccatgctcctgaccttggagttgaccaacacacacctgtactcttcataccacgtagaaaggcatgcatgataaacccatagcccaaaacctatatgaaaagaatagttgatggtcaaaggacactggaacctcagtcactctgtatgctgtcagttgtgggtactggcttttgtgtccccagattgagttttctgatagacagctctgcatgtctggagccatcgctgagtgctggggtaattctatcctctgctgcataaaactgagaaatgaggagtgtgaccaagagacgcacttgccaatgcacctgaaaaagaagcctcagccccaagtgcagtgctccttgtttagcacaccgtcagggatccaaagttacctctgaatttttttctgtaggattcagttatttaaagatttgatcaaggatccaatggtgatttccaaatttattttttccatgaaagaaggaattactccagcttacagtatctgaaatccagaggagtactacagtggtagatttaaaccctacccaagttaacctttcaaggtgacatgaaaatcacccacaaaggaatcctagccaaagtcaaatgtcagccagtttgaaaagcagtgatccgtgaaggtgggggccatctgccttcacagggccattggcaggcagttgtgaggtgccaaggggaaccatgttgagaaattgcagggataagcctgtatctctcaaaattatgccccagcaccaagagtgtgattcatcatactcacttggcaatgggccaagaggttagtcctaaaggtactgtcatgtcttatcttctggtcattgtggcaggtgcttacaggtgtggtctctaggctataaatcccggcttcaccatggcaaattcttacacttgtgcctcactgtcctcatctgtgaatcaaaattaccatgcagatgaaattggaaagtattctttattcaatactacttatcttgttatggtatccctccaattttctttcacccttttagtggaggaaagttatttagtcttatctatttctatgtgttgtgcagctgcttcttcttttcctctgcagttgccctggcatgtgtttttaaagagaaacccagtggatattctgatgttatgacttcaggcactgatagtcctaaagggtcaaaaacttttagaaggcttgcttatacctgagtgacacaaatatctctatctgacatgagatctaacaacatcctgcccagatccctttatgaagctggtgttcacccagccatcatctgccatgagaatgggctcaccaagggctcagacctgtccacttcttcagagcattgccctctgctgaaggggagcttccattcctggaagattatactcttccctcctccaggaggaagtccacagccaatgatgagctgcaacagggtacagaaggccatccctcttgccgccaagtctggcacaaatcacatgagttcaagctaaatcaagctccatctgaaaccacaactttgtttaactcttttttctgytcagtcttctctcactctcttcatccctaaaacatcccgttattaaagtagttagtggtgcttctacgaaacttaagacagaaactttactaaatcatcatgttctgcaaattgttagcacattattgattggaaacaggaagaatgggagtcattagctaagaaaagtcctagctccaaagtacagataaatgttctgagtctcctaaaagcctggggaaagcaaggaatttttcaccatcaatttgagttgatgaactagtcttaccactggaaattaaggaggcgcccatgtgatcagtacttggcagcactaggagctgggagtgatgagtcctcatgaattctcaagacaaggctggctgstgtcaccgtgcagttgcatttcccaccaccttaatatattattacagagcaataatcgagcagaccaatcacaaataagtaccaacaatgtgttttgctcartggaggcacccagtcatctcatttagctagggttgccagataaaatagaggacacttagttaaatatgaattttagataagaaacaaaaatattttagtataagtatatcctatggaatgtttggagcatacttacagtaaaagaaaattacctgttgtttttctgaaattcaagtttaactgagagctctatatatttatgtgctaaatctgacaaccctaaattcatcttatagcacataattgtctgattttcagaaccaatgttcttgatttaaatgaactttcttttaaagttcttaacagaattgaagctgctccctctaagaaacattaaggcaatgttattgctattgttttgcagctggatgaaattggcatttatgaccaacacaaatggtaaaattccagttaggaggtaagtaatcattcctatctgctgtccgtgtcccgggtcaacgcttgtcatcccaaaccaaagagagaacccttcacaagtatttgtgtgttaaatgctttaaagatatttctggaatcttagtttcaattgctttgacaaatgctatattcagtttgtaaaaatcatttatggaagtaaaactgcatttttttggtcaaaataggtggcaaaagaggtactttgacaatttaaagaacatcagaaaatgtagaactattttttaaaatcggcaaataagtggtttttaggatttatgtttcttttgcttatttgccatgagaaactgttagctaaacttaaagaagattttattgtgcacctactgtggaagggtgtggaccrtgtcttgagaagtgtgatgcctctgaacagagcattttcattctgggctttgctgctcctctggtgctcagggcagatggggatacttctctggcttcgtgctgcctactctctacatgtactgtaactgacaccacacactctgtggagctatcctttccacctttgccctgatgcaggtaacaatgacaaagaataaaaaggcttgaggcagggcatggtggctcatacctgtaatcccagcactttgggaggccgcagcgggtggatcacaggtcaggagatcaacaccatccctgctaacacagtgaaactccgtctctactaaaaatacaaaaagaaaaaaaaaattagccgggtgtggtgkcaggcacctgtagtcccagctactgggaggctgaggcaggagaatggcatggaacctggaggcagagcttgcagtgagtcgagatggcaccactgcactccagcctgggtgacagagtgagactccatctcaaaaaaaaaaaaaaaaaaaaaagacttgagtggaatcaagaataaagaaaacatggacaggatacatcctccacatgtgttctttaatacttaagtggacagatttcaccctctgaggattccccatgcatccctctyttctgcttctcacttccttccaggggttagggtttacacatggtctctgggtacagttggaaactctttccacagtagtgatgggaattctttaccaaactcttcagtacctttttggttggtgtttgttttaagcattcatggaaattccagaagctgggctgggccccagggcatctgcttttcacatgaagacaggcatgtatctggattcgtgaacctaagcccacaaccagaatcaaacatgggttccccagatgccaactctctcttccagggttctccagactcaggttcatgttcacttctctggacaccactttagcaaatacgcaaatcaacaaataataacaaacaaaacccagaactactgggtggaatcctgtcttagaattgatctgtctttcagaaataaccaggtcaccgagtgcgtagcatctgtgtggatgcattgagcagtggcatgtgctgtggctcctggcatttctgactctcctttgcctccttccctgcccagctgcttcattctgctctgcarcttccattctgcatccctgtgagactatctccatactcccttgacattactcttttcatatttaacagaattgtcccagaagacctcatttttctcaatcttgtatattaaacaatcacgacctaaagtatccatgtgaccacttaaatatcgagaaaatgtaaagcacagaagtcatgaagaccttagacaattttttttaaatttaactctttattgagggcttgttgagtcatggacctcatgcatttgttgtggtctttccaaatctatctgtaggattctctgcttttatttaataacttgctagcaagtcaacttttagtctgctttagaagattgaaaaaagccctgttagcagccttgactgatggttgttggcagatactttatgcttatccttatttaaaatcctttgctcagttgagtaatagcagaacaattattttaatgtatcccagtaccctacagctattgcatttttatttaaaatcagagagcacaaagcagtgtgaagaatagaaatgtaggttggatgtgtttttacatgccttactatcctgctttttcttccaagatgaggttcaggaaatgggcaaagtagagacacatagattgtgatcaaagcacttctaaccagcagtcttggtttcatttgtatgtatcctatgaatcaagtcattgtcatacaagctttgaagtcgtttctgattccagtgatttttatctaacatgttcacatacaaaattattaccacctttttgtagaaatagcttagatattttggcatcttctttagctctctttgacatggactccatggtgcttgccagtattaacaggtgtttgacacaagacggctgtgatttgggggcagtttgttagagttgatggagaattgataccatgccagaaaaaaaatcagataactctattggtgaatgagctgccaagagttagttggaaattgttgtgtatgttttaatggatatgaagagtaaacacttttaaaatgttattcactatcattctgaagtttctaaaatggaaactattagtgtactgtccataatattaaaagagatctggcttcatagtgattacatagcttgggaatggttcctgctctttagcattaaaccaaaatttaatatccaggaagttgcaggaataacacatgaagaaagtcttaccttttgtctccctcttctcttgtcttgctgtttacataacccatgcagtctgcctttctctcaaattcacaaatttacactcagtttatcctcccactcagaccaaagttttggaaatarcaattctcttttgccaccttccctcctctctcgtaacctggagtgaacaccaatgactagaaaattgggaagtgagtagccagacagtagttgtgggcaggggctggaagagatcccaaacaaaacggctgtgttaaagaaggctgagagccgcaggtgccgtcttggaagcatccctatataatcagcccaaccatgtcctgaaggcccagcagcccacgaagaaggtatgattctgctggggcagttgccccatccttcactcaagagttctctgtaactttcagaacacggtgttaaaaccatcgtgtagattgcagaccctgtttcagctagcaaagagtgggactcccttagtttctaggatcgttgctgttttagccacttgcgaagtcccccggaatagaatttaaccaggactctaataggactggacacaactcaggggtgtttgcttttgtagcatttcttttggggaatgggggtggtttagtttgattcaacaaaaactcattgagtaccagttagctatgaggcactaagcttatgtgaacatggggctatatagagatttgagtaaatcacattccctttgtaaatgctctatgttcccatgaaacacagccacgatattatctcccttcttggccccctccatctcccttccccttgagacattcttctactttctatttgttggcacctggccaaaccctagccaaaagattcaatttctgtgtaggaaacagaagctattggtacccaggttctgtttcaccagaaaggctcagtctccacacccgctgatttcatgcccacgttgatcagttttcatctcgttatgccaggcatgtccaaacctaacagaggcttcagttagctgggatacccctgagattgctatgcaaagattgttctcctgagagcaaatgccagatcctgccagagtcttactagctaggttaacacaaactttttatgaaataatagtcaccctgaacagctactttcccctaaattaaaaaggctacaaaatttttgtcttaccccaaatttaatgtataaaaattacctgaactctagagatgaaaaatgtaaacatagcaccctctatactaggaatcttaaccatttattgatgtcacacacatattctctcccatatttgtagatttgttaaagagaattcacaggcctccttatatttgaatacaactgtctcaagaactcttaaaaatgtacttcttgaagtattcttggacctggcatgaaacaataaagctgtgaatgaacacataattcatttacctacagctacttcttagtctattttgggaagtcctactctgccactgaagtggtgctttctcccactcaggaagaggaactgtcagcactctcattcagaacttgccttctacttagcacggatggcggaaagtacaaaaacgctgggcatgagatgctgttaaaaatccttctgtgctcacaggggaggcattccaaagccagccctcatggatagaagtaaaactccatcctcaagtcaagctggacttctgaatgtcgagttaaaatgaaattatcatggtaacacattacctgggcttccaatcagggagcgattgaaggctccttggtggctaaggtatggctcagagccaagtgtggtgttccagggtaccaagtcctctgctcaatagctttcattctgagtggcaccaacacatttataatggagagtctctcctaacttttatcatcaccaggaagtgtgttcatcaaggtgttatctattctactagccttgatgctcactgttctagttaaaaggctatccaaaaatactatgtcttggggtactactgagatttgttgaaacattggataattgttccccttccccctcacccaacccatcatgttgacagtaaagtcccttatccttgaggcagctgacatttcagaggggctcaagggtgcttagcttgaaaacaagaacaaaatatgtctgatcacgcccgtgtcaactgtggttaagtgtgggaaccaggataaggacaactgaaggcatggattgagttgtaaggggccgcctccttttccctaggcccagwtattgtcaacatgagggtttgttctagagctactgtcttatctgccacattcctttttcataagaaggcaatttggtagcatcagaatttatcattgtttttgtccaaaaatgtgtgtcccaggccaggmgctgtggctcatgyctgtaatcctagcactttgggaggccgaggtgggtggatcacctgaggtcaggagtttgagaccagcctcaccaatatgatgaaaccccdtctctactaaaaatacaaaaaattagccaggtgtggtggcgtgcacctrtagtcccagctactygggaggctgaggcgggagaattgcttgaacctgggatgcagaggttgcagtgagctgagatagcgccactgcactccagcctaggtgacagagtgagactctgtctcaaaaaataaaaaataaaaaataaatgtgtgtccctccagtgccgcttgccccttgttctcccaagcaccagggggacccctggtcttagattcaagttgcatcactagactaaccagctctgggaaccagagggacactggaggaactagtttgggaaatgaaaaacatctgcaatgagaggtaattttattctcctcttccttttaccctagtctcactctccatagtaggacctggatctttgcatcagagaaaacataatgaacaataactggaatgtgtgtttctttcttttctgccctagtattactagaacatttgcatcgggaaaaacagaaaaggtgatctttcaagcactcaaggagttaggtcttcccagtggaaaggtatgcattaacttaataatgtatttctaaaaccattttgtttatttatcttctcatatgtaatgagctagattatttatattaaactgatctaaattagatttggaattatatgtcagtgacatatagtacagttaattttcttttctttcttcttcctccctctcccttcctctctccctccctcctttccttcctcccttccttccttttgttgcctgggcattttaacctaaatctctaaaaatgtaaatagtttgcttcaaatgatttttgtcacctttcttaagaaaaggaaatgaaggccagctygctgtgttacacagtttttattttagagaagctcaccaacactgcctcaaccaggcacaacattagcatgaataattaactaataaattcaattctacaagatggctatgcaatattttgtgaagcatctctccccgcaccatttgtattcatggcccttcaaatttaaaataattgaaattaatttattgacttgaagaaagattgaagcctggtactattttaataagtcctatttgaaatataaatttcagtttgaaaagtaaaatcttacatggttaccctaagcccrttcacatggtcttgcaaaaattcacaaaataagcataattaaaccttgggcttgatttattcagcatccctcaggcaggcacttttctccctcaaggtgagttggaggaaatatttatattcgttctttggggtatttcccagagcaaggccagctgtagccaggtgttygcacacacagaatctggcagcatgataactagaaacactgatgtacacgcactgttttttagtgagatggcctggcagtgcctggaagttggcctcctggcttctgtcagcaggaatcagagatgaagaccctgagtccaagtggtcttcactgtgcttcatgaccctgtagcttctcaccctccaagggaaaaacggttctgtgattcataacatgattttattccttacagaatgatgaaattgagcccacagcattttcttatgaaaagttctatgaactgacacaaaagatttgtcctcggacagatatagaagatcttttcaaaaaaatgtaagttccacttatgaggaagtgccatataaatattatcactgtccttttcgattttttaaaacgtttttgtcctattttaatagagtatgttggtagcatctaggaatatctagtcagggttacatttttaaccccatactttatcagtgtaaaagttcactctgagtttttgagaaacttttacgtatattaattgcagcacctggaacttttttttgcattggctttactaactacctacaattttaacctgctcctttaggtattaacccattatgtgaactaactagattcaatttggaatgttaatatgtttttgaaaagttgattcattccaattatttcaaatggatgacttacatgttgtttttgaaataatatcttttgaaaacggtaaaaaaaaaaaaaaattgcagactttttctgtgacctagtgggagtgttttccttctgttgttgttgttgttgttgttttatttttctccctttatgaacagtctctggccattttaagaattcaccactacttcagggttagaaaataagtttagaattatcatcaacaaatgtcaacatgtaaatcgtacatactgtagcatcatatacaaaaacttactttttctaataaatttcttttcagcaatggagacaaaactgattatttaacggtagaccaattagtgagctttctaaatgaagtaagctttttcatacattaactccataaagtctgtgtgcagtggcttgccttctctggtgtcctcattgcatgcctgcatcatatgcccttattcgctttgcttctgacctgctgatctttccattatggctttaccaggtgcaaaaatcagctgccgccctgtgtgttcatgtgctttcttcacattggctttgcacaccactttttgttggtttctggctgttacatgtagctctggttctgtgtgtatgtgtgaattgtataatatattcatttaagtaaatgtgtctgtgtttttgcaagatgatatttaaggtactttttttctattgatctcattaaatagaaagagaatggattgagtttactacactgtagttggattctccattgctaactttatctcatacctttgcatggactggaaagctttatttttgtcttttaatggattgcatgtaagaaaaatatgttggctcaaatagaatattttgacaacaagcaaaacacttgagttcctgggtgaaaatacattgagttttaggctaataggattgcaggttaaatttgtactttttctttttataacaagctcagagctaattttagaatgtgattaacttaacaaccaaaactgatagatagaattgcttaagcacaagagaaaaatattttcgaacaaaaaaagtttgcaacttttattacaactaaaatgaactacttttttcttcacacatacaaaaaaagttttcccttcagtgaaacccatcaagactcttgttaatccaaaatggaaaattcacttttttttctaacacattaataagagtttgagtgaaggatggacagtatgcttttgtttcaaaataatttaagttaatcattataccatataaagagaaaatgcaagaaaagatggtatcatgccagataaaacgtattatcttaagaaaagataaaaaggcagaccttaatttgccacttcatagagacaaattacatcttcttttcttccgttgtgaaggttcagtggcttcaaatttataaaggtcgcactttagaaactatgttaactaaagtgtaaatgcactgatgcaagaaagagaaaatcctaccccacatatcagacagatgcctctaaaataatccttcgtgtacaatacaatgtttattttactcgaaaacatttcaaatttttccactccactggtttttagtcatataaatacaatgttcataatctttacccagatactatccacgttcttatgccacagctgctcagaagttaaattgctttgttttgtttctttaaccccttccccttcttctgccttttgttttttggtttcttgttttgttttgttttatatcccttggcttcttcatgcactttggttcagtgatcatcttaggtttggtgaggtgaagagggaagacggtttagtgtaaaggagaaaatctaccacatcttcagtttgccacttccaagacaaggcctcttgtgttctttgggatgaagccctctcttaaacattacagagaccttaatactgcatttcactgttaaagaatgaagcaactcttaggtcttgaggataagtgcagtatttataggctcttatctaatgcatttccttttatgggttgtttttgttggtgctcccaacagtcactcctgtaattcttagacataacatttaattttttaaaaatatcatcatccatactttcttgttctgccattcagattctttctttaagtatttattattygtcaaccttttatccctcacaattacagtagacaatagtattcttttttttaatagtgtttccttctatttgatgtcttcttaacattaaggaagtaccttaaattttggggtgtgactgatggaatcggtgtgattctagatttctttaggtcataggaactgtaagactactcaggaaagtctatagcctttatttttaatccaagtgtctgccctgaatttattccttttctawcctagtgaactcaactggaagaactagacaaaaacatgaatgtcggcttgaagaagccttgtcaaacatagagaacattctgcctgttccttgcactccctcttttgagtcctaccctggcccctcttatctctccaaaatcaaaaacaccccttgggcagaacaacttcaatactcataacaaaaggagacagacagagctcactcaagaaagaatgggcattggaatgtaagggtcaattactccaagagtttaaacctaaacattttcaaaatgccttagccacatagtctcaacaagccagtattcaacactgcattggaagcccctgtgaaggttccttgtgaaggttcaatggcttcaaatttataaagcttgcactttagaaactctgttaactgaagtgtaaatgcactgatgcaagaaagagcaagtactaccccacatatcagacagatgcctctacttttaaataatcctttgagtatgatacgatgtttattttacttgaaaatatttcaagtttttccactccactggttcatataatgagacaaaaaaataaacaagtcccatgaacactggaaaggacaaggtcctagtctcatttgcagatgttgattgtctactctgatataaacaattccacggaaaaactgtttgaagtaattagagagttcagcaaggtaaccagagaaacaatgagcaaagcaaaaacctggagacacrcatacactgccattaaccaggtagaatagatagtaggaaaacataaatcccatttatattagcaaaagacatgctggttcctaccaccttccagctggttaatcctttcactctttctatgaaagtttttattcatatactaatgtgtatcttcagggggctgcaaggagaggagagactatatatatagtccatttactgctttggtcaccctgtagggtgacctcctccctatccatgcaatcaacactgactagattttcagtagtagctttagacctgactcctcattggcttctcagtatttccttgttcgttgctccccaaagtgtgatccatggaccagcagcatcggcaccccttgggagcttattagaaatgctcagtcttgggtcccacccagacctgctgagtcagagtctgaatttaacaagatctccaggtgatttatctgcacattcaagtttgtaaagcaccatcctagtggattactggattcctccttggaatgtttagtgtgagtgggaagaatatgagagcgacatataccttctgttattctccattaagaatttagccataggaatccaccactcagagctaaaattttgccacatctatgtctcttagtctcatccaatggactgagggaaatcttctttgcctataatatgaaaatagcaaactagagtccaggagggatagcagaggcacttaatgtgagctgccacgtggtgagacactactactggctcaattgcttgtatgtggcaagactagataaaacctcttggctttggttagttttacctccctttccctattcctaatgagaagcaaaattgatttttagttttaccttcattctttgtttgacttcttacaaagatgataactagggtcctgcagaattgggagatgggtggagggcaggagagagrgataaaaacaaggaagagagggaaaaggccttaggtggccacaggaatcaaggagtagctttactttcttgttgctggtaatcttcccccttcctcacacatatcataggatcacatcagggctcaacctgacttttttctttttgcagatgaaagaatattttaaaaggacccatgatctctttccttttacaagatctttatgctttaaatgcacaggcaaagagagagaaggagggtatttagtcttatgagtaagcttatccttgccaattattccttctatatttttaaaatattatttatgtcaacattcatctctcccagtgctacttggattgaagccagacgatgcctcttctcagcaccagtaaggacgtaatactggagttctcttcatctcctccttacttacttggacacagttctgtgacctatttttggaagtcatttagaatctcattttacaaagcactggataccatggggtgaataacctgagtaacttgtttccccaaatcctggctgaaaactgatggttcctcagagatgtgaaacattcacctcactgtgcttgtgtctctgtggaactctactgcagccttattactgtgagatcagctggaagtgatccttctcctcttgtttttccatatgaaaatgatagttttctgactctaatgcaaatcttatatttgtttccttgcctttggattacccagattgatttgtgttacctttttgaagcatgaagattttagggagagctgaagattgttatctagtgggagcagaagcaaaaacaaatgcaatttcgcattgtctgcacttcatgcttatttgctgcgaatgtaattttcagaataggggattatgatacatccattttagggcttggttttcctggctttgttttgccataggcaggatggtctaatgaatgtcataccctctgactaaattttaatagtgtttaattgggaggacatctgaaacactgaacatgcttctatccttgtgagacttrggtacttttctttttactgatgtgcaaatatgttaaaatgcatacctttatatgttaggtaaagtgattcttatacttgagcacatcagaattactcagaagtcttatgaaaaacacagattaataggttccaccccagagatcagcagattcagtagatctagggagggacctgagaagctgcatttctagcaagttgacaggtgttggtgaggctgatgctgccatccacagatcacacttcaggtagtaccttgtcagaataaacacatgtatgtatattttaaaatgcacaaaaatgtctgagttctgtctcctttcctaattttatctcttctctctcctgtagctgaatcccttttttctctcattttttaattcatatggatttgccycatcatctccatgagttcaaaatatttaccaacaaacatatttttaaatttaaaaaacttaattttaataaggaagataaataaagtggccacctatgaacataacagtgctggggtctaaaaaggacctttttcatcctttatccatcttctaccatgatattatttatggagatgtgagaagggatgtgcctagaaagatgggtttgttgttgttgtcagtttgtttgtttttaaaacaatgcattctcaccagaaagacggagctccttgtttccttgagtagtgggctccattgcacgatggcatcaatttcctaaacaaggtgtagcatgccttcacttgcctggcattccatggtccacctcacaatcctcttccctgcatatcccataacttttgttcttggtggcctcgaggcctgctgttaacataacagtttctgttgtagcatatgcatgaatgttagctgttgtgagccataatttcttagattacaacagaagcatgcttcattgggataaattgatgaaatttgatattgattccttatgagttaatgctcttaactcggtgggggaggaggggacccagaaaaggctgggccccatatgcatgaggaaatgacatccaagtgctctgttggccaaaagcattcattctgtgtatagctcacttttccaatgcccattccaaagcaaatagggaagggaaatccatatgaacttttaacagttgctttttaaatacctttccaacaatgtttttcagtccgtgcatatatttgggtaaagagttgtcaccaaggtcctatttattgaccaggttttgctcacacctgcttatctgtcattattccaaacttccattgaggtttgctttatttattcacttattcattatttttgtaagggcygaccagggacacagtgctgtcctctaatcctcagtgaacagaaaggaagtttagtggacccactgccaacacacatacacacacaaacacacactattggagctgagtaagttagtaaactgggtttttcatcattgccatgaagttaggatgataccattgcagggacagcattgctcctggtgcctcatgtcatagcaggagctccttaggtgtcaatttgaaaacaataatgtcaccaacctcttaagtcccgtaatcattcatggactctctgcccagagaattctatattgtttatagcttgtaaatatgcttgtactgattaattttcatcattacaattggttcgttttgaaaaaaatagttactcaagaaaatgaaatttgttgagtgcccaagaaatcatggattgatgtagaaaggtgttatgaaaaagagatgatgtttgcctgtgtaacattaggctttttgttgttattgcttttggggtttttgaggggtgcacttaaattagtatattacctatttgaactattttggggggttggtgtttgctttttaaaaatattttgacctcacgttttatagatattcatgccaaatgtcttccctgttgtgtgggaactggaagacagtacaattgacatgcacactttattatgtatccttcaacttttgaaggggaaaaaatgtattctctctctctctctagttcagggagagtaacccaaaagtattcccaaatgtggactttttgaagtatactttaaggagaaaggcaggaaggcagtgaggtcctatctttgtaattataaacatgacagtctagatatattttgttttataaattataaacttagtaatgtctaatgcctcaaggccaagaaatatcaacctaaatggagttattttcttatcatagcatcaacgagatcctcgattgaatgaaattttatttccattttatgatgccaaaagggcaatgcagatcattgagatgtatgaacctgatgaagatttgaagaaaaaaggtaataaacatgaaaaaaggacttaaaaaaaaaaacaagaaaagatgcaacttttaaagccttggtttatttaaaggtatctgtaaatgctttgcaactccctgagccatggattgatgactatttttttttcctgctcttaagttcgtataaattttacctttcatcagaattagtcaatcctgactgaagtatactgttacatttattgtattattaaatacattatagtgatgtttccccatgtactttcttgtattagattttagtattgcatattgcttgaaatattaaaacaaccaatacagtctctacttgcaatccttgaaaataatttttgtcatataaaaacttataccttttctttttctcccttttgttttgccaagccaaataaatttaatacgtgatttgatgtgcagtaaccctcatttgacctctggtatgaaagataaatacaattgatatgaaattaaatagtcaggaatcgccttagctaattgctggacctttgtccctttcaaagaagctttggaaacaaagggttgttcgcacaaatatttgtcaaaggaaaggcatggggagaaattttaaaatcagtcccacagcagtgagaaatgcctgcggaacatgggagggagagctgggggtacctgagctagagcctttggcgttatgtctcagtggagaatgtaaagagatgaaagttcaagttccataggtcccgtatgtccgtgaatctcaaggtctcagtttcctcctttttaaaatctatttttttctttgtatctaatrccagtgagtgtggttgaatggtctgtakgttatctggaccctctttttaggtatacctggccctctacactccatgatttcacccctgatatttttccaagcccaatagttttccctttagttgtagttgtacagtttacactttctgctatggctgaagatacctattttaagcaagaatgcttcattccttccctctctgtcaatattctgaatatcataatttatttcacattgcttatgattacagcaaagggaggtacagcttggtagaaaatctaacacttcgcattggcaggaggtgatatgattcttgtcacttccctgtgaccttgagctaggaactggcctcctgggcctcagtttccctgcttgtaaggtggtggggctcatgcagtaatttggctagtatttcccttccctaccttcattctttgaagtttgtagagggctgacygggtgccaagcactgtgccagatgctaggaattcaaaacaataagaaatgtccccagccttgaaggcagttgcgatctgttcaaggagaaagacaagtgattcaacaattccttggcagtgtgataaatgtcatgattgaggtgtgtccttgtttatttccaaattccttctaagttttaaaggtctatgaagtgaccattgacacatctaaaaagggtagcttgaccatttcacaagtgatggaaattttaacgtctgtcattttcaagygtgggtgagaatggagtacaaagccattcttataaacttctggtaagaccctacattggtacaaccatcttggggaatattttggcaatagtttataaagtgaaaaatatgcctcttatacagcccagcattttcacttctaggtatgtaccctagagaatctctcatctatttcccaaactctggataccagagcggcacagttctcagatctctgctccacctatattcactctgtacctgagctcatccaagccaatggctttacatttcttctattaaactctccagtcctaacctccagcttacactacagacttgtagtagaactctccatctggatgttgaatgggcatttccaatgtatatatacaacatatttcgatccttcctacccctagatatgttcctttcaaagcytataaaatagtacygttatttacccagtcaaaaccactgggctcatgttggacttgtttcattctttcacatcatgtctggttcatttgcaaaacctgtaagatccagcctcaaaagaaatcctaaataaatcacttctcaccatctccaacattactgactatccaaaccttcatcatccctctccaggcaatgccttctccttcctactcagtgccctacaatttatggtccacacagcagccagagtaarccttttaaaaccaaatctaatcatgttattccaccctttgaaaccctccaaaggcttcccaacacatttagaataaaatctaaaatacttagtgaggactaaagcccaagtgatgtagcctttggctccatctccaatctcacttcaagctacctttttccttggtcacttgctctgtcttgctgtcattgaatgatgttggcacgcatacatctgcatcaaggtctttgcacttgatgatccttctgcctggactggtgtttcctgggtgtgcacgtggcttgctcctcacacatgtacgtgacctcagaagggctttcactggcccatatttaacacagcatcctgccatgcttcatcaccttcctccctgctttctctgtccttctagtacctctttgacattatatttatttgtttacttatttgtttctgtcactcataatatgagagtttcatgaaggcagggcttacctgtttcttctatcactgcatctatcctggtgcctctaaaagtacttgctctttagaatgaatgaaggtgcccaaggaaagaggtatacaaatttctactttcatttataattagaaatgacctaactatccatcaaccaaataatggataataaattatgatatattcatatatggacttctgtaccttcagtgaaaaataaatgaacaagatctacctacatagctggtatataaagataaaaatagcaagttgcaaatgcacacagtgggatagtttttacataaaattaaaaacagcccaaactaccygttgtttggataaatgcatatgtagtaaggttgcagaaccattttggaggtaaacaccaaaactaggatactagttatctatctggtatggaatggaattgaggtggggtatacaggatgctgcagtggcatcagaaattatgtattcttttacatgtaagtcaaataatcaaaaatgtaaatcaaataaggcaaaatgttgagatctgaccacactggtgtaggcccgtggctattcattatgctatcatctgaacacttctgtattagcttgaaatcagttcataacttgcaagttcttaaataaaacaaaaacttgaagctgtcgatgcatcaaccatttataagttgcataaatactgattgttgctcctgtagttaccacgtgggctctaccccatgtcagaaaggtgtgatcgaaatgaagggtggcttttggggccacgtttcaatgaccrctgtatactcttctcaccagtcccataacctgacttttagataaaattgaaaactgaattgtttaaactcagaagcaccatcatctccaagaaaaatcccttttccaattcagtgagaacaatgtcttataattaatacattttccatttttaaagagcacctctcgtatctattctcatttcccattatgaagatcttggaagtcagataggkccagtctttttccccaattgacagaagaagaagctgagatctaggagccaaaggagtgagtagcaagagcagaacttgatacaggccccctggacccctggtcaccataactcccagtgctgtgtttctgaacttgggggaccatgtacatctgccatcatggatgtaaaagcagaataccacctgtttgtggaattcattatgttacttataatgtgcaactctcttatttcattcaagttctgacagatgaaagttcttgggaaagagactgtgaagacgtttttactcttataatttaagctgcctcagcttccatgaataaaacatgagatrtgcatcttcagagctacaagtgctactaagatgttctttttcccctaggccttatatcaagtgatgggttttgcagatatctgatgtcagatgaaaacgccccagtcttcctagatcgtttagaactttaccaagaaatggaccatcctctggctcactacttcatcagttcttcccataacacttatctcactggcagacagttcggcgggaagtcttcggtagaaatgtacagacaggttctcctggctggttgcaggtgaggaactcaagatggcaatttgttttttgtgtgtgatgcccttcagtttaatttacttttctctgaaaaacaggaaatagtaatcaggatgaaaaggaaatttgtttattccctttaatggattatcatggtcatttaacgttgagaaaagaaggacagtatctctttcggaaaaatctkcagtcatccaaaagactttactgtgaaaagacttttctttactgtaaatttaaaatatgccyccaaaaccacaaaaaagaaaacatgcatattgtaagaaggcrtgttgarttttttgttgattataggtacttgttaytagcaccatgctctaaccaattgagctaactggccattgattataggcacttgtaaattagctttttttttttttttttagtatttattgatcattcttgggtgtttctcagtttctcagagagggggatgtggcagggtcataggataatagtggagagaaggtcagcagataaacacgtgaacaaaggtctctggttttcctaggcagaggtccctgccgccttcggcagtgtttgtgtccctgggtacttgagattagggagtggtgatgactcttaactagcatgctgccttctagcatctgtttaacaaagcacatcttgtaccgcccttaatccatttaaccctgagttgacacascacatgtttcagagagcacggggttgggggtaagattatagattaacagcatcccaaggcagaagaatttttcttagtacagaacaaaatggtgtctcctatgtcaacttcttactacacagacacagtaacaatctgatctctctttcttttccccacatttcycscttttcttttcgacaaaaccgccatcgtcatcatggcccgttctcgatggtcactgtctctttggagctgttgggtacacttcccagatggggcggcctggcagaggtgctcctcacctcccagatgatgggcggccaggcagaggtgctccccacctcccagacggggcggccgggcagaggcgctcctcacctcccagatggggtggcggctgggcagaggcgctcctcacttcccagtcgtggcggctgggcaaaggcgcttctcacatcccagacggggtggcggccgggcaaaggctctcctcacttctcagacggggcggctggcagaggcgctcctcacatcccagatggggtggcggccgggcagaggcgctcctcacctcccagatggggtggtggccgggcagaggcgctcctcacctcccagacggggcagccgggcagaggcgctcctcgcttcccagacggggcggccgggcagaggtgctcctcgcttcccagacggggcagccgggcagaggggctccccacatcccagacgatgggcagccaggcagagatgctccccacttcctagacggggtggcggccgggcagaggctgtaatcttagcactttgggaggccaaggcaggcggctggaaggtggaggttgtggcgagccgagatcacgccactacactccagcctgggcaacactgagcattgagtgagcgagactccgtctgcaatcccagcaccccgggaggccgaggctggcagaccactcgaggtcaggagccggagaccagccccgtcaacagggcgataccccatctcctccaaaaatagaaaaaccagtcaggcgtggtggcgcacacccgcaatcccaggcacttggcaggccgaggcaggagaaccacggaagtccggggcagrgaggctgcagcgagccgagaccacggcagtatagtccagcctcggcaacggagggagaccgaagaaaggagggagggggagggggagagggagagggagagggtaaattagctttatttgatgtaaaagttcaaaaatttagttctctgagagtagaaattattaaaatcgtttttgttttatagaaactggcaaatatttgagatttaaaatatggcaaaaatgatgaaagtgaaaaataagaaatgtagttacattatgtttttttcttggttataaattaaacaatactttatttttttaattcatttttttttggatatggaaatatgttaaaagaaattaactgtcttactacttccatttgcaaacttcctctgaatacctgagtatgaatcactaaacattttctgaaatggccaaagtaacattatccagcctatcaaaattaaaagtaatttttttaatttattttattttattattattatactttaagttttagggtacatatgcacaacgtgcaggtttgttatatatgtatacatgcgccatgttggtgtcctgcacccattaactcgtcatttagcattagatatatctcctaatgctatccctcccccctccccccaccccacaacagtcccatgtcatctaaaacccagcccacattcatatttccccagttgtccccaaccaaattgtccttttttttttttttaattgggacagagtcttactttgttgcccaggctggagtgcagtggcatgatgtcagctcactggaacctcccctcctgggttcaagcaattctcatgccttagcctcccaggtagctgggattacagcctcccaagtagccatcacacctggctaatttttgtatttttagtagagatggggtttcaccatgttggccaggctggtctccaactcctgacctcaagtgatccgccttcctaggacacaccacgcccggcccccaaattgtcctttattgcgttttgtcacaagtaggatttcatccagaaccatgatgcttgttatatttcttaagtctcttaatctcactcagacaatccccttttgataataccaaccagatgaggaatataatgtggttttaacctgtatatgccatgaaataatcaggttacttaatttattcaattttctgttctggaagaaaacaacttattttgatgtctttcttttaatttgtatgaacactatttcattgtaaagtttcaatattgtaacttcactatrtccctagatgtgttgaacttgactgctgggatggaaaaggtgaagaccaagaaccaataataactcatggaaaagcaatgtgtacagatatcctttttaaggtaactttaaaaataattacacagacttttccaaactctgtgaaaatgcaggaaatagggagatggagaagagaaaacaaatgattcattttctcaagcattatgccttcatattcccttcttccagtcttgaggaaaaagtcaagacaaagatcttttccactgaacgtccccttcatgatactgttcttgctttcaaatggtgactgtgttacataacaaggtttctctggcagagtttacctagttttacttaccttagaaacagtgtctccttttgttatctacttatttgcttatttactttacattattcctaaaggacttcaaggtggcataaaaagataaatagaatacaggaataaaatagattgtaaatagggcctacaagaataagaaaggccgggcgtggtggctcacgcctgtwatcccagcactttgggaagccgaggcagggagatcacctgagatcaggagttggagaccagcctgaccaacatggggaaaccctgtctctaccaaaaatgcaaaattagctgggcatggtggcacatgcctgtaatctcagctactcaggaggctgaggcaggagaatggcttgaacccgagaggtggaggttgcagtgagccgagattacactgttgcattctagcctggacaacaagagtgaaactccatctcaataaataaataagtaaataataagataatgaggttagacaaatcaaaagaatgaaattctgtggtttgcaaatgtcagctgcagctgtctgtcggtttggtataactcaggatagatattacaacaccaggagcagcggttctcaactccacctacatgtgaaacatcaccatgggtattttcaaaaacataggtgctgctgggcgtggtggctcatgcctataatcccaacactttgggaggtggaggcaggtggatcacttgacgtcaggagttcaagatcagcctggccaacatggtgaaaccctgtctgtactaaaaatacaaaaattagctggtgtggtggcatgcacctgtaatcccagctgaggcagagtcaggagaattgcttgaacacaggaggcagaggttgcagtgaaaccagatcatgccattgctctccagcctcagcaacagagcgagactctgtctcaaaaaaaacacacatacacacacacgcagatgtctagatgctatgcatagtatttctcttagccaagatattggagagttttgaccagcaatgaattcaagataatacttcttgatatgtaccaagagtatattcaagtgggaagccatgaatttgcatagccaggaagaataactaaatgactacctcagccacaaggaatgcctcaataaaatatttcaagattatctaaccttgggctttatcatgtcaaatggatttgcctagataactattgtgaaatatttttctgattaactgaatgatgagatttgccctgtgattagctacaaaccagtaagaatttggggatttttaccaaatatgatgctccggttgtagaagtgctggtttgaagcctttctttctaaagctaagcagagacggggccaaccatctcttaaagcctctcctatttcatggagaatagtgaaagggaagattatgtttagctccttcaaatgttgttttctgtaattaagttctgtgttacagatggggggtcaagaacacttctatgtttcacttacatgttgcttgaccaacgagaaccccttcccccggccttgtaaccaggctaataggaaacaagggatactgcaaatgtcactttagtacacagaggtctacatcaagttaatgaagtatagcccaagactgatttccaaacacagaggaaagtcagtgaaagcctccagcagtcctgaggttactacccacacttttctgcatgaggtggggaggagtcatacagtggtcgggagtgaaaacctctgtgccagagatcacctgctcctcaagaagaaaggtggactctgaactcctggcctggcagattaacaagccacagactggcatgccatttaggtgaaatctcttgtaagttaatagcaccataattctggagaagtaaaagatagcttaaaaaattgtcattaaccattaactgcaccctggctataaccacagggaactcaacctttagaggtgtcaaggtagatgggggctccaggtctgaattgctggaattgactttctgaaagactcaattaatagtctctgaatagttttgggtgccttaatttttttgctcttttctctcattaacgtttttttttgtttttaaaggatgtaattcaagccatcaaggaaactgcatttgtcacatcagaatatcctgtaattctctcctttgaaaatcactgcaggtataatgatccattctgccacaagtctctatgtggtattgtttcctaacccctaatgcccactcctgctctacaactttttaaatagctgaatagtttgttttgtgaagtactaagttcaaataattctccagcaagggcacctactcttatgcaaagcaaaaaacaacaaaaaaaggaaaaaacgacaaaaaaccacccttgtccccccaaaccaaatcattttaatgtgtttcagaaatacttgttccaaataaaagttcagagattgggacaccttacttaaagttccattgagctggaagatttgacagtatatttgaaatcagatttgatgaacttgaaagacattttttattcttctttccagctcttagttttggaacagaatctccttctccttcttttaaaattataccagttaaagtttttgatacatctcacattagcattaagaggacaataatgcattttgccaagtgagaatctttaattgcctagtaatgggtgtttcttattcttggacggttaatgggtgtttgaatttacaaatgccacttttttctctccagcaaatatcaacagtacaagatgtccaaatattgcgaagatctatttggggatctcctgttgaaacaagcacttgaatcacatccagtatgtatttttaacaaaccatatttctagcatgaatggatttgttttgaaaatttctgaagggtcaagtagtactagaggactaatgctaaagatcttcatatttatttaaattctttggtayggaaagcttacatcatgcttcagagggatgtaaagagacacaaaataaacatctggttcaatttcatttggaggatctttgggtcttatggttttcagatctcagtcttaaagtttcataaagcacccaggccaagagtccagattcaggtcagttgttctcaaattcagttacatgttagaatcacctacaaaactgttaaaaacacctgtgccagggccccacttggagactgatttaattgatgcagggtcagccctgagcatggtgttttaaaagccctccaggtgaactgtatatgcacccggtattcagaacccatgggaggctcatgctgtggaaagtgccctggattgatgtcacgacatcctgaagttcatgttcctaactccaaaataaatcactgagtaatgttgcacatacatttttgaacttcatkttaaacctgctaatttcttcataaagcaaagaacattaacctgtgctccatagataggctttatgagatctgtgaattcattctaattgcatgcaatttttttgtatatactcattctagagagttaatcacatttttataaggatccatgacctccaagagattaagatccacaatcacaagatgttatgagctccaaggcagctaatgaaatcaaagtggaaagacctgctattgacagcagcacctgatgggctcaaacctggtagcatgaggtagtggcagaagaacatcacagcaaatgacagcaggaaggtgctttgtgctacatgtaaacactttatgaggttcttttcagaagtgtgtctatgggaactgaaaaaaaatatgagagacaaggatatctgtatcctttgtcccccttccttcttccctcgaacttgcagaagcagttgctgcaggtgacctgcccatatccttgcagtgcctcctgtttccctgaacactggcctgactttccactgccaacatccacagctttttgcctgagagtgagctctggtcactggagcctgctctgccacacatgaaagaccagcagtgccagggaattatcacccctatcccatgcttcatccctcccgaggtgggataaccctgagcacctgctcttctctgccttccagggtttcccagcaggatcgtgctccagctggctgcagtgataacacacccttgatgagctgcctgtcttctttttctcactttcccacacctctgttggagtttccttccaagtagacgacctggtgcaatactacttttctctgaggctgattttaagggaacccaaactaagaaacagctctgatttattttatttgtttttacctaggccctccatttatctttctgattaggttaaggtgattgcttttgtggaaagttcactgtattcttagtgaagtgatgtgcacatacttttaccagctgaagggtgtccaggttcttggcatcttgaacaaagaatcrgacaaaatgcacaaacaaagcaagggaagaatgaagcaacaaaagcagagatttattgaaaatgaaagtacactccacagggtgggagcagcctgagcagaggggctcaagagccctgttacagaattttctggggtttaaataccctctagaggtttccattggttacttggtgtccggtctatgtaaatgaataggatgaagtaaagttataaagtcatttacttggtgtacatcctttgtaaatggagaggatatttcctgtcatagctgaagtgtttccatttgatttagttctaggaagtcagcatgaataggccttatattccctgcctcaagaccctattctcctttgaatacaggacaggtgtctggggaagcatgggtaatataaatgggaataagacctgctccaaaagctaaagagctttcaaccttgggagtgggagcaggacacaaatgtgaacacataactagaaaagaagatggcgtatggtgctttatttgttggaggtgtcctggtacaagagagatcactggggaatgggccagttataccacgctgctggaaggaaacagcatttcaacaaagggttttatttgaggcaagacagacatatgagtgcacagtgccttacatataataagtagtataaaagcaagttttgaaaatgaatggatgggtggaggggtgggtgggtgggcatatagagagatgggtggaggaatggggaatggaagactagatacaggacggttctgtagaccagaggtgatagcatacaggggcacctcctttgcagatataaatctaagcaaatgatgctgtagtcaagttcagattccaggaattggaacaactcccttcttgattcccttatcaaacctacaaaaccacaaaaccacaatctcaagtgttgagggttgggtcagcctactcagcagacaggcttactatacagcctgacacttggggggatctggggggcctctcacttgggaaagctaattctgaacccagccatcacaattgtcccttgcactttaccagatacttaaaaggtgcaaggccctctggggagcaggaacccctccccggcacatcccaggccagacccctgctccactggggaggttggagcagctctgcacacctctggaaactatgtggatttcaagtttgcagcactagtctaaggaaaagctcaatgggtgtgctaatttgggttggggagtgaaaacagaaggctgtgccgcctgccatctagtgggtgttgggttgcatcactcccaggcctcccaggctcctcctggactgggaaggagaatggagaagcacagcccttccttaattcagctctttctgtttctctctagcttgaaccaggcagggctttgccatcccccaatgacctcaaaagaaaaatactcataaaaaacaagcggctgaaacctgaagttgaaaaaagtaagtgaaacacacacatttataatggaagcatacataacatgtgtggacatttcagctgttgagaattcaatttattttaaaaccactgatttttgggggaagggtgtaggggtgatgttacaggtacttttcagagcaagattgccacatttccatttaaatttaatttccatatcaattaattcatgcagcaggaaaagcatatctatatattcaaatgccagaatttggagagggcccaaggaaaattgagaggaaagtagaagcattttagaatttctcaakatataaggaaccagcattttataattttatacactctraagtcctcataagtttcccttttcagtttgccccgtgctctatacctatctagggatactaggtacatatgagtgtgtgactgtgtatatgtgaatagagagatctagagacaaatgattttatataaacatgtttccttttattctcccaggatgatttccttgaaaatattttctttcagagtatatcctagttcagtgaattaatggtatcaaatattggcatgattacacttcattttccccccaagtattctaaatgaaaaattttaaattatgttaatgacagtttattttattacaaaagcaataatgccatagaaaaatcaagacaatgaaaagtgtaagaaagtaacagcactaacatatattatacacgtattcatatactatagacacatgtacgtaatgtacatgtgtagatatatacccacatttttaacatgactgagatcatattaatgatactgagtttaaatttttaaaatttaaccaagtaagtatacttacatcagcaggatatacatctacatactaactttaatcctaatgtatgaaacactatatagaatttaatatatatgacatagaattgtatgcatttattatagcatgatgtaacgagtcccaagttgatggattttcactactataaacatgcttgaatgttattttgtatgtttgtgcaaccctctccttgaaatcaattggtgcaattagagttattcagccaaaacgtatatatattttatattgtgatatagtttgttatgctttcttttaggaaagttctaccaccttagactcttcaccagtcatatatgagagtgcctgtttcccaccaatatccttaatgctggctgttggccatttttaaatgtgtgtccaactcatagaaaaaaattggtaccttaggggtttttttatttgtgtgtcttcaataactccttttttgcatattactatttgtggtttgtccctatgtgttttcccatttttattattttgtttacctttatctttctgacttatagaaaaattatttagtcttattttgtatagtaggatataatccccattaaatcagttgcaaatattttttcctgaagttttgttgccaacctgcctattttctatcagttccccataactgttcataaaccttggtctgtgccagattctccaaattatgggcttttgttatctagccttaaatccttcacgaggactgaacctcctctcaaacttggtgaccagaattttgggcatttcacccatgtccccgcaattcttcatcatgtgtatataaggtggttgttgcaggtttcttacaaggtcgagaccaccaggaaatggcgagagagagawcactgctgaaccttagaaacatggtgccttggtgcctgaacattctatttcttctctcttttcacgtcctcctcagtgtcgatctcaaggcctagggtttgtatgttacctagcatctgtcaccatctctttgcgtgtttttgctaacagaacagctggaagctttgagaagcatgatggaagctggagaatctgcctccccagcaaacatcttagaggacgataatgaagaggagatcgaaagtggtgagctgtttgcttttattttaagttacatgctttgaaaatactttttaaataagaaaaccaggctgggcacagtggctcaagcccataatcccagcacttggggaggccaaggtgggaggattgcttgagcccaggagttcaagaccagcctgggcaacattttcgtagagatgagaccccatgtctacaaaaaataaaatattagccagacgtggtggcctgtgtctgtagtcccagctactggggaggctgaggcagtaggatcccttgagcccagaggttcaaggctgcagtgagctatatgtaatcctaccactgcactccaggctggacaacagactraggccttgtttcaaaaataaatgagtaagaaaaccaggaatttctttcagaagacccttttatataataatgccgttttaattcctcatagtaatattttggtattcttggtattttgccaaacacttcccattttttctggctactaaattttaatggccttgtcatctcccttcctattggccattcagctattcagcagaaattcttagccagagaatccctgaagcacttgctgtagtaggcagaggaagcaatataaggcacattttgtaatccctttgtatagacaaaaacatgaacttgagtctgttaatgatgagagtagagaggcaaataatttaagagaccctcaggcaaatgattggtttgtctccacaaagtgaactagaaactaaaagccagtattaaaatttcaagttcaaattccttcaaataaccagctcaccagaattatctctgtgtagctagataattttaagaaggcagtcttgcttaaaatatttgagtatgtgctattaccttctcttttactttgatcacatagcaacaatcataatgttcagttgtaaatgggtcatttgagagtttggggatgattttagagaattatttgtttgttatgtttcatgagaattgatgaacgaaatgacaaggacttgtgttggttatacaatgccttggatttatatacaggcataccttggaaatattgcagattcagttctagaccactacaatgaagtaaatattgcaaaaaaattattcacaagaatttttgtttaccaatgcatacagaaattatttacactgtactgtaggctagtaagtgttcaataacagcattatgtccaaaaatgtaacttaattaaaaaatacctattgcttaaaaatgctgacaattatctaaacctgcatcatattgaaatctttttgtggagggtcttgccttgagtgatcagggaggcagttgccaaagattgggttggctgtggtaattttttaaaataagacaacaatgaagtttgctgcatcaattgacccttcttttcacaaaagatttctctgtagcatgcagtgccatttgatgacactttacccagagcagagcttctttcaaaattgaagccaatcctctcaaaccctgctgtgatgccttctcaactaggtttatgtaatattttaaatcctgtgttgtcatttcaacaatgctcacagtatctttacctggagtagattccatctcaagaaaccaccttctttgctcattcacaagaaacaactcctcatcggtttaagttttatcatgaaattgcagcaattcagccccatgttcaggctccttttcaaattctagttctcttactctttctaccacctctgcagtgacttcctccactgaagtcttgaacctctcagcgtcatccatgggagtctcccaaactcctatgaacgttgatatttttacctcttcccataaatcatgaatgttctttcttaatagcatctagaatggtgaacatcagaagcttttcagtttactttgcccagatccatcagaggacattctcttttaggaaagctagacatagagctaaaaatccaaaagttggaagaattaactaaccttattcaagactccttaataaagactcctgactgtggaacagactttataagtgactcagttgcatgtccagtccttgggtttgacattactcccagagaaaagtcataatgactgtactttcatttgttttatgtggcagggagggtctaagaggctaaagatatctgatactactcagttgatactcgttattatggtcatctgttactatgcaataaaccatccccaaatttaggggcttataacaacaccttatcattttctgtcataattctgtgggtcatgtgggcttaggttggtggttctcccttgggtttctcctgcttttgtcagcagatgacatctggggctgactggttcccttgggtgggttatcccggacggcttactcacatgctggcagtggatgctggctgaacgctgggagctcmgctgggcctcactgaccatagtatccctgtggcctctctctgtgacttgggcttctcatagcacgatggctaagtcccccagatggaacatctaagagccagtgtctcaagaggcaggaagcagaagctgctaaattagttaagagctaggcctggaactggtgcagtatcacttcctctatgttttattcatcgaagcagtctcagggcccatccaagttcaagagggtgagtgagtgacaaggtcacgttgcataagagcacagaggagggcagatgatacggcagctgtctttggaaaatatagtcagccgtgatgcctactatattttttcacatgtttttgcaaataataaatctaaacaagatttaagaaaaatatatttatagaactgtgtttcaaatggtcaagaaaatactcctaagatacaaaaaagatgactattcagtaaaaccagttcctttaagttaaatttcatagatggtaattaaaatatgtaaggcattactgatacgataatccagtaaaacaaactgcagaaataatggaataaattaacaagaaaacaatgttaataataattactaccatcgttgtaccaacagtggaccaggcagcttacattatggccttatctaacctgtatacagcctgatgaaatgggtattattattattattattattatttttgagatggagtcttgctctgtcacccaggctggagtgcagtggcgcgatctcggctcactgcaagctctgcctctgaaatgggtattattamaccaatttttcagatgagaggactgaagcttagagaggtaacatattttgcacatgatcccacagcgggcaaccgattgcactaagattcaatcccagagctacctgattcaagtcaagacttttgtacgttacagtactgccctttcaattcacaggaatatggtgaaaacatagatatgcaaaaatacttttttaaaaaggagaaagaatagaaygaatgaaagtcaaagatgtgatgtttcctaaacacacacagtcatctgaaattagcatctgtatggcttcatgtattattcttaaaggtgctttcccaccatctacatccatatggtaattattcctccaggcagaaaaatatttgcctctagtgactcccatgttattccaaaatatacttgagatttgggttaagtcttaacagaaataaccacatgatttagtatccacgtaggaaagtacctaaggacagaatcatccacctagatggcacaaggctcctgtttcacctgttatgtgtgtgattcttaggttgcctcagtaatacttggctttggttctggtcaactagtcggctataattaccttagtgccactgtatgaatctactatctatgtgtggctagagtctctaatttaaatacatcaacacagcaggcaaggggaaaccaagcatagttcaataggggaggcctgcctggaggctgtagaaaatagaaaaggctttcagtcagtgaaagcaggtgcccaggcattaggctggatttagattcagaaggacatgtggctcccaggataggagacaagtagtggagaatatcaaaattgtatgtggttataggtgtgtctgtgcatatctgcacactcagaaagtgatcatgtattcatacaattctcttaaggtggttagtaagtctccaccacttgtttggggtatgccccttgccttcaagtggtttacatctgtattggcagtttagacataaattaaattaaatgaaatgaaattaataaattaaatgaaaatttaatagtgacatgagaagttttgaaatcttggttactgactgtaggtcatggaaacctagtcctggaagaactgtgttaagaattcaagagacaggtagatccattatcttgctgtgtgatttcagacaagtcaaatcatatctctgcatctagttcctcgtttataagtaaagacagatgctggattagattattttaagatgtattccatttcctcaaatccttttcttcctgcctaagccttacaattacccacttgttgttgttgttgttgtttggattttgtttttttaatcgtctgcctctagaatatcccttcatcagaattgttagctccagaagaggaaggtggctgtttctttccctcaccctcytcctgtgcctggagagatacttcacaaaataaaacagtctatctagaaattctgaatccagatactaccagttgaaagataccactrttttattatgactaagaaagaaaaagtagtttccattcactggaaaaaaccgtcagttgaagaacacactacaatatcagaaatattaaatcaaaaaaagtacatcttagaatcagtgaaatcatttttcatttactcctgttctttcattctcctttgtacttttaaacatgctttaaaaaaatctatctcattcttatgggtctactcatttcctttctgaatttctcagaaattattttagtgggtttttttgttttgtttttacagtaacgttccctcatgccctgtggtgtgaccatgtggatttatattgtcctcatcctgatgtctgtgggtttctcctgatcctggctagattttaggcaaattctttatctgggaattactgcaaatagtgattgtgtgaatccaaatctcacctcagcatgttgcacattttccagcaggtacttcttttttttccccacgaacatcctgggtggattctggcattcttgtcactttcctggaccaatgaacacagtgtgtgtacttcctttcacagactagaccacgctccagggacaccagctttatttggcacccacttccacttctcctcctacctgagcctgacaaatgagccctgagcctttgaaacctatgctaggtttgacaaatagtttgcaggagtagcacaatccttctgaggcctttcttttttctaccactccaagctataagtcattatgcccataaaattcaagtggacaktttagtctctttcaaaattatccgatgtatttgttttcttgcatcttcttatttgctcttgatgtcatgaaagatcaaaacacctttttatgagttatagatattcctgcagtgtttgaggctttcatttttagaattagtatactagaatagaagtagccatccacttaaaaaaaatttattaagcatcaagcatttcaaaccacattttaggagcaggagaaataatacataacaagatgtgctccttgacgttgaataggtaagagtttagtgagagttttacttgaaaaaatactgcatatatcaatgtccccattttcttttagcatcctttttctctaaaagtgcttatgttctacccaagattgtgaacaaggtctgactacttggcagtggtttggtgtcatggattttccatttgtctttcacacagctgaccaagaggaggaagctcaccccgaattcaaatttggaaatgaactttctgctgatgacttgggtcacaaggaagctgttgcaaatagcgtcaagaaggtcagagtcccctttctttcatcactctcaagaggtagcagctgttatttatgaaattttggaaatgtgagaaccacaagagaataaagtaacctataattccccttctaaattgcttaggatacgagtctgtgctgggtgaccagaacttgacacatacacaatattaaatttaaaaggacatttaaattactcattagtcagggccagtgttaaccactacccatttggccagtgtcctctaaatattatcatttattgtgttattgcagctggggagggagaaaatgacagcatcccaggggtaagatttaatcttgaattcatcaggaaaatgacccctgaacatcccgagtctagccctcatttgagaactagtcctgctaattatataccttccccstaaagtacagtaagcataaaaatgtttccagatattcagccaaggaaaatagttattcatatacttaccttttrtcaggcatagtctaggccataatgacctaaaagtgtaaaacacacttgccttctgcccttaggcagctcatggccccctgtagtttagggaaagggatcggaaacagcaaacaagcaagtaktcaaataactatataattacaacttacggtgagtgcaattatgaacataaacacgaatgctgaagaataatgaagtagaaagaataaggaaaccagaacgcaaagggtcaagaggaattggccatgcacagaggttgatgaatcactttccatgcggagggaccacagtaacaacagcaagggctgtgagtagagtggcttgagtgagggtggagtgagacgagatgaggcaggtaggtgggaactgggtgatgtaggattttggaggccattatgagaaattcaaatattcagtgaaatgtgacactactgaaaaagtttagagaagggggcagtgtagcctgattcaagttttaaaagattgctgtggttgccatatggagactagtttaggaggaaacaggagtggaagcaggaaaagcagtgaggacaggctgctgctctaggccagacgagagtccccgatggtcaaaccagacaatgcatcaragaggactgagtggcttcaagacatattgagaaatgggacagcctactgatggatggaatgtgggaatgagagagaaagaagaagtgagatgaccctctagtgtccttgtttgaggaactgggtaggtgatggtaccatttactggcatggggaagaccgaaagagaaagaattcaggagtttcaaatgggatgactatttgagatgcctgtgaagtattcaaggggaggtgttcatatagcattgccatctgactctttctctgggttcatttcctaactgtctaactttgggtaagttacttaacctctgtgtaccttagtttcctcatctgcaaagtgaagacgataacacctatttcatggggtcactgtgaagagtggatggtttgtgacatgtcaagagcttagcgtggtgcctggtacatggtaactcctgtaaaggtattagttgctggtatattatcatccttttcatctttatcattgtcattatcctcatgatcactggcgtcattatcacgcgtatatagaagacaggttgagctagagatacaagttgggagttcaaaagatcgtatttgaaacaatggaaatactgagatgattcacaaggaaaggtggaaaagaaggcccaagtggagccctagttaaaagtggagccagaaaagaagagcaaggtatggctagagaagtaggagggaaattaggcagtgacaccaagaaaaccaggaaagagaacagtgttaacagaaggactgagtggttgactgtagaatatgttaaaaatcttagacaaattaaatttaacagagtttagttgagcaaaaaaaacaattcccaaattgggcaggacccaaaccagaagaggttcagagaaactccagtgcagccatgtggtggaagattttttggcagaaaaaggaaagtgacctacagaaaacagaagtgaggtacagaagcagctgtattggttacaggcttatttgccttatttgaacagaggttgaatagttggccacctttgattggctgaaactcagtgattggcacatgagtaggttccagtctgtttacacacccattcagtctacagtttactatgtgaaagtttatgaaaaaacctttagaataggtaaagagacacctttaggctaaacttaatttaacaaatgctactgactgattaagtaagaagactcaagagtgtcctttgggttgttagcatggaggtcgttggcaaccttaaagagacatttcagtggagtgccaggcagggtggtgacactggatcacacagatatgaatgactagagactatgcttttgagaagttttgatgtgaaggggagcaagaaatggactggtggccaagggcacctgaggagtcaagggagtgttttctttttcggatgaatgaatctggagtgtgtttgaaaacttggaagtggtgcagtagagaggaagagattagttttgcaggaaagagaggggataactgcctggaattccttgaggaggtggaagagggtgggattgctgtggtgcaaaggtgtggcccttcacaggagcaggaacacctgattagtgaagacagtggatgaagatgcaggtaggcagatacatttggtgataggaagaggggagagtatttgtctgatgagcaaagccaaaggaatattgcctttacacactatcttttctgatatagggaattgtgactactctgagaatattgaacgtctattaagactcaagagtattgttttaatacaaaaattagccaggcgccatggtacgygcctgtaatcccagctactcaggaagctgaggcaggagaactgcttgaacccaaaaggcggaggttgcagtgagccaagattgtgccactgcactccagcctgggcaacagagcaakactgtgtctcaaaaaaaaaaaaaaaaaaaaagttgctaaagccttcatcaatattgtcttagtgtcttagtcagttggtgctgctatcacaaaaataccattggcttaaacaactgaaaactatttgtcaccattctagagtctaagaagtctaagatcaaggttccacgcaatcagttcctaatgtggggggccttcttcgtgtttatgtcctcatgtggtggacagagaataaggaggcaagctctctcttggcttggccctcatgaccaaattacctcccaaaggccccatcttcaaatgccatcacatgagaattaaggtttcagtatatgaattggggacagtatggggggctgcaccagcaaacagtccataacaaatacccagacatgaatgctgagttactcaagagtgaccattcatgctgcttttcctaagccccatgactaaagcactaattaaataattataataaaacatctaagtaggtaaagactgtccacgaaggagggaaagagcattaagattagcccttctggtgcataaaacagtgaggccatccatggctttttgtcatcagtaatgtcccaccttagcaaataaatagaataacaagtttacctacacttatttaaatatctatgtatgtatggctaataaatttggaattttgccctttagagaagtaaacaaattatttcctttctctaattaggcttcagatgaccttgaacatgaaaacaacaaaaaggtaacaaaataattcccttgcacattttaaatcagatgcatctaatttaaaaaatcttcaaaggaaggaatcagttgtggtgaaaaaatgattaaatcctgataaaaatcacaaaactagggcagatgagtaagatgattttctaaaagtaggtatttaatgcagtaaggcattttcttcactggaattagagatttcattcctgcagtggaactacatgatcatcagcatattgaatttgaaaataaaaatgagtgaataggtcatcaaatccatattatagcataatagaaaggatgatcttagttcccactacattgacattctggaagatcactgattaattttacactgcataacttctaagagtattatttgatgttattagctattggccttattgtaggaaaggtaaagttacattttcactttctttcatcctcttcaaagttcttcaagtgatcacagtggttttatttagtaagtatttatggtttatcctacaacagtgaggctgacagccacaggcagaagtttgcctaataacttcattctcatacttcagaggttcggaaaatactgccttgctgcctgtggggtcctatcctatttgaagttgagatcgtatcttctcaccctctaaatattaaacttgaaagaattatgaataaatatggtcgcaggcctgtcccaaaatatttgtgagtacattactctcttgttctagaatttcataattcataatttgggtcaacagtatacagattgacatttggtcattgtcatttattagctaagttattttaattctcaaggcatcaatcttctcatgtggtcagtgggtaggactctaatcctcactacacatcacagacagtaatgagactgtgtgtgcaagaactcatcctggtgctcagctcatagcactggtggtatttattattattaaacacacatggaaggaacggacatggccgttgtttggtgggggagcaggaggacacattaagaaaatgataaaaacaaaaacaaaaccaaattacattacttgattattgtttcaggcttttattggtgaaatcagtttgataatttagaatgctcagattgttaagtgatcagttaagacaaacaaattgaccatttttttttttttttgagatggagtctcactctgtygcccaggctggagtgcagtggcgtgatctccgctcactgaaagctctgccccccgggttcacttcattcgccattctcctgcctcagcctcccagtagctgggactacaggtgcctgccaccatgcccagttaatttttttgtatttttaatagagatggggtttcacagtgttcaccaggatggtctcgatctcctgacctcatgatccacccgcctcagcctcccaaagtgctgggattacaggcgtgagccactgcgcccagcatctgaccattttttaactcatggattacatcatccaactaaggaatttatccaactagattcactttatgcaggaaatttagctttgcaaagttctcagcaaaaatattgatcacttttgaaggtatttttgttgttggttttattgttgttttttctatcaataaataaactaatttgttttcttttttctgtatgcaaagtaatgcagtttcaatatgtcctatgcagcaagttattaggttacttttaagattaagtgctttttaaatactataaaccacgtatgtatgttgcttacattctagagtgctacagtgaaacatagtccccaaagaggcagcatcattagcacctgggaactagttacagcaatgactggcctcactgcagactcacttcaacagaaactctgagtgtggggcccaggaatctgttctagtttaaaaagtcttccaggtgattctgatgcacgctaatgttcgagagtcactatttttgatgttgtgcctcaatttgtaaaaatatgatgctatatctatttcatagcattgctgtgaggtccaatatagtaatttctttttttttttttttgagatggagtcttgctctgttgcctggtctggagtgcagtggcacaatctcagctcaccrcaacctctgcctcctgggttcaagcgattctcctgcctcagcctcccaagtagctggaattacaggctcacgccaccacacccagctaatttttggcatttttagtagagatggggttttgccatgttcgccaagtttgtcttgaactcctggcctcccaaagtgctggattaaaggcatgagccaccgttcccggccagtaatttcttgaataaagtcccttaaaaatctaaaaatgtcctacaaatgtaagataagcttaatattttatgattacctccttttgcattattcagagctacaacagacactaacttcttaaagtatcctttagcataattgaggaagaaaaagcctttacctttcaatttgtgtgtgtgcaattatctttattaaggaaatctgcagcacgtatccgtgggtcctactgaagtcatcaacttatatgttttcttccttgtgcttgtagggcctggtcactgtagaagatgagcaggcrtggatggcatcttataaatatgtaggtgctaccactaatatccatccatatttgtccacaatgatcaactacgcccagcctgtaaagtttcaaggtttccatgtggcagaaggtaacaccaaaggttaaatgcagtcrccttttttgcttgattttcttttatggtgctgatgagcttttatctaatttgttgccatttttctttgtgggcatgggggctgttccacctcaccttatttttgtttcacagaccatagaagccaccttggtatgtggtgacattacattgtcattcacgacttcaaccacaaggtggcgatgagagactatggatttgttagtgctgggcatgtagcttcttctgttcccaagtgcattcacaagactccttttaatcaaaagctggttttcaaaaaaacataagaagtatttaaaaacttcatttctgggctagagaagccatcgtaatcatcattatcatcaaaaattcatatttcggtggtggctgaaaagacagatgtctccatccacaggatgtcaatgaaagtaggagctactgacatgataatgtagcattagcctccaaggcctcatgattcagggtgtaattgcatttatttattgctgtttttcggtgagggtttgatggcagagttcctgaatccatctttgcttttcttttacagaacgcaatattcattataacatgtcttcttttaatgaatcagtcggtcttggctacttgaagacacatgcaattgaatttgtcaagtatccttatgtatcaagtggaatgagtggttgactcacgttggtttggcaagagcctctgaaatagataaatggctaatatctcattctggtggtggagttcataaaatgatatgtgggaaagaccatggcagctgtgacaatctgcccaaatgaaaattgtttttataatccacacagtgaactgtgatcttaagcatcatttgtaaatgtgaaatctgctctgtgctgtcyacttgtttgtcattgttggcctagacctttgttgttttagctctttgttgtttatttttctctgctgtaggactctttttttctsttttccttaataagttacagttataacaaacggcaaatgagtcgcatttaccccaagggaggccgagtcgattccagtaattacatgcctcagattttctggaacgctggctgccagatggtttcactgaactatcaaaccccaggtaggagctgatgtccagtgaccccaaattccatgagaacactttgacaggatggtgccagcamttcccatcagttggctgtgggcattttttaaaggaagcagacatatggcaaagcaatgtgttattggatttatataatggtgagaaataaaaaaaaaaaaaccaaaatagagcaaacaatggtagaagataatgtgttgtgattggaatttaattcctttcataaatgccatgactattcctgctaaccattatcccatattccaaaatatttctcatttttcttccttttggatcaaagttgttatctttgtttccagaggcagaattaagtgaaaagaatttgagtatctttgtacagtaacagcgactcatttctcctttggcaaacaccctgaccactgtgaacattcagcaaatatgactgatgcaggggcacttcactaaacaaatacagaatattttgaagtaaatgccactaaaatggtatataaggagttacatatttgaagaggtactaatctataacttggtcctccaaagtgtactcaaagtcaggtttccaatatataatgactttttttttctggaaggaaaagagtaaatttttataattgataaacacatttttaaaatttttgaggtttgcttaagagcctaggatcacagtatcaagactagaggtagcaaaatagaaatagaatagatagaaatatgccacaaaccctcttcactgtagatggtcaattctacagcatggttcttacaactggtaaaataaaacaaaaccagaaagctcttttttccttcaactctttgctattaagagaactgcccatgcttcccaatttgaggattttttaaaatctattttgtattttaagaatccctgtcacttcgttccctgctatgtggattgagtggaagatcctttgactttcattcctttggcatgagtgtgagctgactgtgcttctcatgccttgaaggagcctccccagtgaccagaagctcctcctactggagtcaccattctgcatggggtccccacagtgcttgctaggttagactgtgacgtgatagctaccaatacaatcctgagtgtttctagctggggcccagtaacaaggctctgatgacttcacttacttaaaaaagcccaacttgtgttctcagttgtcagtgagtccataatatggattaaatggctaacccagcttatgttttattctataatattaggtttaaacacaacattttgaagaggaaaaaatatccatcagtttacccatttcttttgcggatgggaagaaagaaaaaatgttattcacttgcaagacagaagtcaaaagccatgtgctgccagtgtagaccccactagagtaattccccctgcctcccatcctggaagcatgccaccaagttttatgcgatacttacctagttcattttccagtcttttaaatcaagtttcatattcaccctcccgggtatctccagggttcctctgcccagggatcctgagacccatcctctcccactgtagcaggttggatatctctactctcaatactcatcaaacaatggtgtgactcctatattgaatccagttttaaaagtgacctttagcatgatctttatgaaaacacattttatgtttaatttaaatgaaacatgaggtcaattcaacatggaagagagtatgccttaaatagaccaagcagaaccttgtagtattaaagagggacctgtgggcctaggagcaatctgatacctattgtttcaaatcaccccgtcagggtcttttttgtctaggaagacaagatgctaaattatttttgtctcttgacagatttagcgatgcaattgaatcagggaaaatttgagtataatggatcgtgcgggtgagtaatatgatttaaactgttttcacctagattgagaactccatactacagctctaatgaagccatgtcattttcaattaggggctacagaatttaagctgggtttgagggatggaatagaaagaaatgaaatacctagagaatatttgcacatatacattcttcatctaccccattttactaagcaggttttgggttttttaaatcacaagtgaagcagttcatacatatgctacagtttaatcctctcactttaaaatcaatagtggaggattttatgtctgggacaggtaataatccctgcacacttggacattaactggagatgtaggcattaaatatgtgcattttacctaggacaaatcaaataatgaagttaatttcatatgtaatgaagttgtgggtgtcgagctgaatttcattcagttgggaataaacctttgtcctctactgattcttttttgtgtcttgtaagtagcagttatcaaagaataatgctgtgaatattgtcctagtttccttaaatagcactcttgaaaactgtgaaccaagaagtgaaataggaaatgttaattctacagaaacactgaaaggttaaatgaaaatataaaattagaattctcttgagataaaaaaaaaaaaacacaactatgtggtcatcccctcaccccacctcagcctcatgcatctgtccccaaacaagtaaatattaataactccagaccactgcccaaaggcctctagaggaatccaatggaaaactatcccgtcataatgatgctattaggaatttcttcatggtggctcacctgattggatatctttttatcactgaacactgccagtcaagataacatttttcagtggttgtgagttaggaatgacttttcagcatgcactctgcctccctctgccagcctggtgaatggttctctgccaatgtggctgcaaacacagtgattatgctattccccaaatcacccaccacttacatacctggagcatgccctacattttcctctgctgtgtgctttggaagaaaataaattgtgtagctgggaagagaaagatctgaattcatatttcagaattttgtgaaagcaattttgttatttaatgccaagtgttccaacccaggagattttgcgcataaattgctttgtagacctcctcctctcccaagtagtgggccaaggcatcaagccccaggggttcagccctggactgtcagtaaaagccctaggctgggagtctaaagatcagggtttgagctcagctcccagctgctcctagttcttgctgtattgcctagagcaggtgtgttagacccagagcctctcttctctgcttgataaaatgaagacggtgacacctgtcgcacagggtttgttgtactcaaaggaaaaaaaatgtcttttttctagaacgaaacagggaactgaaaaagactttgtcctttgacaaaaaccgagtcctttctgatgagacccacctttgggcttccctctcagtcactgtagaatccagtctgagcaacaatcgtgctagttcagtttagtgaaaatccccagcccttggtatctgaccaccctggatatcctgtcacyttggcctgccttcagcaataatcctatcaagtcagtttggccagaagtccttatccttgatgtttcctcatagtaattttccatctgctggcgctcaccttactccatggttctaaatctccatgtacgcttgttggggtaagggttgagcccttatacctatcaccatggctccctacccctttgaataaagtccactttaccatgtttaacaagtgtttgtgtacatttttttctttaacagtttacgacagctcagtcaggttgaatgagtgtacgaaagtacttcaggaactgcacatttctgtgcaaaagtgagatttaagaaaagcttaaggccttgtgatcaatcacacacacagacattgcaaaattcaatgagtgctctgttcagtcgtcctttaaggaccccaaggagtcagcctcagcactcctggctcttacaggacccgtcgggcatggctgtgctcacttctgaaaacttgcagtggcccggtgatgcttgaagcactttcctcgcccacctcagcgatcacacctaagatgccatcagctgtctaacatgccatgaggaatcctggcagcctggccggatgcagggagtattgtttctgtataaaaaaaatcctgacggctcggcccagtggctcacacctggaatcccagcactttgggaggccgaggcgggcagtggctcacacctggaatcccagcactttgggaggccgaggcgggcagatcacaaggttaggagatcgagaccatcctggctaacacggcgaaatcccgtctctactaaaaayacaaaaaattagccgggcgtggtggcgggcrcctgtagtcccagctacttgggaggctgaggcaggagaatgtcgtgaacctgggaggcagagcttacagtgagccaagatcgtgccactgcactccagcctgggtgacagagcaagactccatctcaaaaaaaaaaaaaaaaaaagtcctgacaatcctatgttgtttgtttttcctagaatttctgcttagccattattagcacgtgcagtgtctcactctctccaccgttatttattttttcttaagacagggtttcgctctgtcacccaggctcaagtgcagtggtgcaaacgtggctyattgaggccttgacatcctgggctcaatccatcctccctcctccacccctcaaatagctaggggtgcccaccaccacacatggctagtttttttatttgtacagatggggtttcaccatgttgcccagactggtctcgaamtcttgagctcaggcaatctgcctgccttggcctcccaaagtgctgggattacaggcatgagctactatgcctgacctcactggtcatttgtaaatgcgttcatttattttaaaataccttcacagaaaaggatactgttgctactttagcctgaattctgtgctgatgtgttggacgctatgtgactgaaagcatacacctcaccagaaargctgaaaaatagcctgtgcagtggggcagcccagcttgataaagtatcagcgatgctgttgactctgtaatctcctaattccccttcccatacacccagctggtggcaaaggctgtcagtgrcagggaaaagagaagaaattgccgtcacctgcatgcctctgtgttccatggcgatggtagatgtggggcccggtgctgcacaggagctcctgtcactggtgctcgggcactgcatggttctcaccgtgtcacccttgtggttctcccacccacctgcaaagacttttaaaaactgcccctttgggctgagtctgaggactgcatttcttaaagaggcattctgtgccctttaggcctgtggaggcaaagaatccctgttttatatagaacatcagtgtgcaaagtacacwaacacccccaggatctagcaactgtagcaaaacgtcagataccctcctgggaaaaccctctgtgctccctggctgatcttgtgggaggacgcaccactgggcccaataagtgtgaatgttaccaggaaagtgagcagtgcttttaacagtctcgtttttgaagatggaaaaatggaagacatttccctaattgcaaatgaaacaaaatagtgtaaattaatacctaaaatctttttagactttcataggaaagtgagtgattgatatcaaaatggtatgacattttatgattcagaggctgttttttatacagcatttctcccttgcccacaggccgtacgttctaagaaccccagtggatgcctgaaaccaccaaacccaacatgtattatatatattgtggttctacacattgcatacctgtgataaagtttaatttataaattaggcatagtaagagattaacatcaatgactaataatggaacagttataacaatatagtgtaataaaagttaggtgaatgtggtctcaaaatatcttaattttttctcttttatgtttattggctatttggatattctgttttgtgaagaacttctactcattttcctattgggttttctatcttttaaaatagattttttatttcaaatttttattttccaatttttatattaggttctattttaatatttttggaacagagttgaccaggggtagctgaagcctcagaaagcaaaattgcaaataaagggggatactgtatagcatagcaacttgcagttatcatcagcagccattttgctttcttgcagctaaataaaataatggcatgttggacaactgatggcatcttaggtatgatgaaataggatgcatttccttatgaccccattttctcattcttggtgctcctatccacccacctggttagcaacccttcttctctccctcgcttgccttccaaggccttacacagtccacagaaaatccttggatccctgtcttggcattggctttggccttgtgcctgtgcctaccgcacagacctagatgtctggaatgagttcattttctgtaccagaaagcaccaaacagaccatctatgtcatttgcagggcccaatgcagaatgaaaatgaagggctcctgagaatttaggatggtggatgcagagcattaaaccaagcatggggcccttctgagttcagggccctgtagaactgcacaattagcacatccacatagccagctctggtgccagattctggcttcagcttccctatcaatgccccagccccctgcaccctcacagccaccagggatatgagaggcaacctctgctgctctctcagaccgccttggacccagaacagatgctcctttgaccttcaaagaaagcttgctaagtgtcctatcccaggccagggcttatctcatggtcctgacaagcttctgcatactctgttttactctcttcaagtatacaaaatgaacccatttcaccggagcatgcctgctttggagaattggatatgggtttcttgcccctttcccctgccatttctcattttggatcaattcactccttcagagatgagtgttctatgcagatttgaaaggggggatgtggaagaatgcttttgaccctgagatgtcattgtgatcccgtttcttattttggtgggtaggaagggctcttgatctttaacaaaggactgtggaaagtgaggaatctctggacactcacttcccaaggagattcagaactggaaaggtgactccagtcctgtattcatccaagtcccgaccttcctcgggaggcagaatccctcatttgccacagctggggtccaaatgctgcctgtgtcatgaaagccagamccaccattgttacctcccctcacagtctgtgtcggttttccttccagagaaagctggtgggcttccctcggagatgcaggcgtagtattgtagctactcacctactttccatcctgattctttaccttttgctgtatcatcatattttctagttgccaactctagccacaaaaaaagctgcaaatctaaaattccatgaatacagaagataatctcttctatatagagagcttttatattaatattgtgggttgcattctcttggagacaagagtgttcaaaattaccttcaacatttcaacaattgtgtaaatgtctatattcttgataaaaaatcagtgttgtctcttaaagattcctttttggactatcaaatgtaagggaatatttttaacactttgttttttgttcagtcttagaagataacaatgaatggtgactttttcaaaactaagaaaagtgacattaaactttaaagaaaaaatatcatgactcaggatcccttttgggttgtattttaacagataataaagttgacatcatctagacttgaaattaataaaagttatgcttctaagaaaaattagagatttgagttcccataattttgattcttttacatttaaaagcaaacctttacttttggaaaaaagtacttttattttcattgatgtactgctcatagtatggattctttaaatctatggttatacttatttctaataattttttaattttttttaagttttttgacacaagtttcagggaaattatggaatctgtgattatatgaccactaccccgtggacatgaggggcagacattgtgtagtgagggtaattgcagaacattttcatcgcctcaaaatctgtatcgtttagctttcatctcccaataggaattttaatctaccctctgtctctatatttgcctattctgaacatttgatataaatgaatttatataacatatggcctttcgtgcctggcttctttcacttaacataatgttttcaaggttcatccaggttgtaatgtgtatcaatactttattatttttattgctgaataattttccattgtatggatataccatgttttgtgccatacattcattcatcgatggacatttgggtaatttccatctctggattattacaaataatgctgctatgaatgttcatatgcaagttcttctatgaatatgtctttccatttatcttggttacatgcataagaatggaattgctgggtcatatggtaactctatgtttaactctttgaggaactgccagactgtctttctaagtgaatgcatcattttacactcctactagcaacatatgagagttccaatttctccacatccttgtcaacacttattgttatctgactcattaattacagtcatcctagtgtatacatagtgatatctcattgtggttttgatattcatttctctgatgactaatgatgttagacatctttttatgtgcttcttggttttttgtatatcttatttggagaaatgtctgttcagatcatttgaccattatttagatgagttattctttatgtattctagatacaggcctctaatcagatatatgaattgcaaattttttcctttttgtgactagtctttttactttcttcatagtgtcttttgaagcataaaagttttcaacagaaaatccagtgtatcattgcatgtgcttttggtatcatgtttagaatccattgccaaattcaggtcataaagatttgtccttatggcttcttttaggaattttgtagtttggctcttgcatttagttattttatcctctttgagctaatttttgtatatggtataaggtaaagatccagttttatttatttatctatttatttgcatggaactatcctattatcctgtcactatttatttaaaagactattctttcacccattgattggtcttggcatccttgtcaaaaatcaattggccatagataacgtggatttatttatagactttgattctgtctcaatgagttatgtgtttttctttatgtcagtaccagactgtcttgattaaatcttgtagcttagtaataagttttgaaatcaagaagtgtgagacacccaattttgttctctcttttaacattgttttggctattcttgatcccttgagtttctatatgaattttaggattagcttgtcagtttctaccaaaaagtcagctgggattttgatagagattacactgaattcacacatcaatttgagaaatacttccagcttaacaatatggtcttccaacccatgaaggcaagatgtcttcccatttatttagctcttctttaatttttttaaacagtgttttgtagttttcaaattgtagacacttattttttttaaaaaagtttattcctaagtggtttatattttgctgttgttatagaattgttttcttaatttcatttttgcatgttcattgtcattgtatagaaatacaattgactttttatatgtttatctggtatcctgcaatagtggtgaatttatttattccaatagtttttttagtggattccttagagtttttttttatttatgggatcatgtcatctgtgactagaaataggcttacttccttctttccaatctggatgccttttaatttgttttcttgcctgattgtttctactagaaatggagaaataatttatttttattttcacctacctctagctgaaatgtcaattacctttgattgtgaatgtagacaacaatccacagtcacattagtggtacccgtgactctctcaccaatgtaaatcacagacattgtcatatttcactactattgttacagctgtctcaaaatatttttgtactttagattattgtcatcataattagatcttaccattagatcttataatttaatgcattattacaagtacaattaatacagaggtagaatatcacatatttttatattttgataactatagctaatataattggtttttcattgttattctttgcattttmttttatacatataaagaaaagtatttaaaggtgaccaggggataaaaaagttccagagaagatgataggatcaggaagtcctggataccactgaggctgcagctctttaaggttgtgcataagggcgggcacattctcttccatccttaggaccctctgcctaaaatcctagctcctgtgttacagatggagaaaaggaagcatccattgtttcaactagcgagtgttttagtctttgtaaaacctactaataaacttctatgctattgtcytaccaggtaccttctcaaaccagatttcatgaggcggcctgatcgaacatttgaccccttctctgaaactcctgttgatggtgttattgcagccacttgctcagtgcaggtaaggcccctgctcatcacaaggtagtataaatgtatacacaagtggtccttgaaagaaattataaaatattgaatgttaaattgcaagatccatgtgctgctcacaactttgacttaagattccaccccctttttaaaaaatgagacccattttttcactagtaaaattattagctacttaaagtgaaagataccatcaaaaaagtacctgctacttgattccatttatacaaaattctagaaaatgcaaattatagtgacagacagtaaatcagtgatggcctttgaaaaaagggcagggaggaatgggttacaaaagggcacaaagaaacttcaggtgatgatacaaatgtttatcatcttaattatggaggtggtttcgcagatgtgctcatatgtcccaactgatctaattttacattttttttttgttttttattttttgacactgagtatcactctgtcgcccaggcaggagtgcagtggcacaatctcggctcactgcaacctcctcctcccggtttcaagtgattctcctgcacctgtagctgggattacaggtgcccaccgccacacctggctaatttttatatttttagtagagatgggtttttaccatgttggccaggctgttctcaaactcctaacctcaggtgatctacctgcctcagcctcccaaagtactggcattacagggatgagccaccgtgcctagcctaattgtacattttaaatgcatataatttattgtatgtcaaatatacctcaaaaaagctgtttcagattgttagctagaaaataatgtaaacaaaaaaccctaataagtggctatagtcatttaaacactaaatgaaaaatcatctctccatagctttatcgtagatagactaacattataaaactgtcctagctgaccagtgtcaatatcagtaatgacagacaaattctagcttcacttttctgtgtgtctcttttcaagacttctaaaagaattcattaataagtatggcatgatggaatttcagagctatgaagggtcttaggacatacctgaattcatcacttcatttcataggtgtagacacttaggtgagatgaagaggccgtggacactatttgtattatgattcatatatattttttctttgttttttttctagacagttctagaaggtagaacatctgcttgaaacagctggggtttttttgcctatagtagttgttcgataatgttttggtttgatagaaatgaatacattattgccatagataattgaaattcctgctcccacccaaaagacagaatttcttacttcctgattattttttgctactgatgcttacacagagcttacttctctttgytctcrttcgtgctgctrcaggttatatcaggtcaattcttatcagataagaaaattggcacctacgtagaggtggatatgtatgggttgcccactgacaccatacgtaaggaattccgaactcgcatggttatgaataatggactcaatccagtttacaatgaagagtcatttgtatttcggaaggtaggacattttcagcacgtcaaacttactctaataacttgggagccatgttttagttcacagacgctacacgatacaggggcacttattcaaccgacaacatcttctttttctcttctcctaatggctaacttctgtagctgtcataggatcattggttctatttggccctgccctccttttggttctcctctcctccttggaagagcccatctcctgcacagcagtgcctcagctctgggtttaccatcttttagaatgagtccttgctggtggacaccatcgtacactagagagttcttccctaccctggaagttactggtaacttacactattcctttagccaagtagtcaggtaagatgctgcactccaaaattttggtcaatagatgtcactacatgggtcagttggcatggtcctgtctctcctgaaagagtgacacctgttgcctacttgcaggtcttatccttcttgtactgttgttagtgttttatttttttctcctaataccgtatgttggatcctaaaaacaatcacagccattctctctaacgttcggttgttaatctcttattcaccttttcccttggtttattttttgtctattgaagatgcagtggaaaatccgcacaccggcagtgctgtctccaagaatgttcactttcctttcttacttactctgttgtcctgaccacaatgatttcttgctgcttctttaggcacaagttttccagctggttctgctccatttgtacatcatgcaacacagataatcagcttctttccttaacaaaatagggattatccatttcagaatagagtaactggcttacagaaaccaaatgaagggagatcaatgtaggtttgatgaaacaggccattttgacatttaagtttacgctgggatccacacaatcttcgcatcccattgtcttcttctctgcccctgtcaggatatggtgtaaattacatgcatagctgtgatttggttttttccttccctggtatttccaatttgttatagctggatccgttaccagtatggctagtgttctttggcatagtgaataatccctactcacatttctagaagctgagaaagttgactcaggcattctttgttttggatgaatgagaaaatacccagcttagtgtttatatataatagttctggcactagaaacgagatgccaattctgagtccttctctgttcttcagaagttaaatcgtttttttcattgctagcaagtgctttaaaaactttgttttctttcttgtcatttttgtatttttcactaatctcacatggcaagaatggcaaatcccaagcctctattcactgcataaggagcaagagagagggaaattggctaagttaccatggtttctcctcttcatcttcattaagctggaattaaattatagccttcagatgtaaataggcaaccagtccattgtctagctttaaacatagcactcagatcaagcaagatgtcctggttgcttttagccaataaaaaggcattcctgattaaacacattggataccctttttgtaatgttgctrttttgtaactgaatcaggtttctgctatctgaactcagattttatgttcatttattccgtttggggatagcaggagtaggtgtcttagaatcaaagtatgttaatktttctagctaccgcatcttactctatttaacatcccaacatttgctggaaactgaggagtacaagaaacaaggaggacccaaatttatgtacaaaagttatctcttatgcatgaagcatttattcagagatacttaatttatttattcagagatactttatttattcagagatactttcgtattcttaaaaacaaacaaatatagatgtcagcaatatgccagatattagatcacaggattagatccccaattcccaggccccactctgtcactgatatgtctaagatcaaggaaagtggctttatttctcatccattatatgggtggggacaaggatcaatcacaagggttgaagtggtaatctttaacattcatttcatctaacatttttcacgagataatttccaggaaacatgttccaattgcttttctcagtgtcttgggcactgtagctcatgcagtacattttggggaatgcagatggatcatggacttactttcaacatcagggaacatttaagaacagcatggatttggtccacactccttagagtcatggttcttgggcgctgcattggaaaaatcagtgaaagtcctgttctgtttgcaggtgatcctgccggacctggctgtcttgagaatagctgtgtatgatgataacaacaagctgattggccagaggatcctcccgcttgatggcctccaagccggatatcgacacatttcccttcgaaatgagggaaataaaccattatcactaccaacaattttctgcaatattgttcttaaaacatatgtgcctgatggatttggaggtaagataaacatttgggtacggaatatgatatagatgaggtcctagattataagattataaaacatcttgtccatgctttaaaaaacaataaaaatactgtctattcctgctaatgctgccaaccctgattaccttgaatacatcaagaatacatcataacctcaggtttcatagtaagaaatgaaagtacaaaacgagatgatctctaaagtcctttcttattttaaaatactataattttatgttgtttatcaatttttacaaacacattttgtgaagggtatatttatattgacaatcagactagggaaaaaaacataaataaggtgaaaccatagatatcttatcaatagtatcgctaaaagatttaaattgaactcagctatcaacatgcctgaattttcttccaaatccacaagaaagttcaatttcataaaaaatcctagtcatcaatccatatgctttaaggtaatcaatgggaggaatccaaagctagattaagtcatagaattttgcttacatgcaaacatgttaactttttatggcctccatctaagccaatacattaaaagaaagcaaagatcctctatattgtcagcctgttgaaccataaggaaatagtacagcaggatgatggcatccgattagccaagggttcaaatccttactctccactgctggcagggtgatcttgggaagaggatgtaacctctcaaacccctcatttcctcccctgcaaagtgaagataataataactacctccctcatagcattattgtgaggtgcttatcattagagtacatgatatagcaaggctcagaaatgtatgagcgcatgggggtgggcrgggtgtctgtagacacagatataatttctatacttyactggaacacatcactattttatctggggaatatgggataattttgctgtttgtttttagtagtgcatgcttctgtggagggcagattttctgcaactaaaccacaactttaccagtctaatatcagagtcaaaaattaaaataagccatgaggatttttccatcccaaaattcatagtccaggctccttcctccttctcctttgtctttcataaaaaaaaaaaaggaagcacattagaagctacaacatacagtaatagaggtaayaacccataaaaagcctggaaagggatgctgtgaggctgggtaagaggatcagaaaggggcactggagacaagtggtrggtttaggagcagcagtccgtggcaaacctcagaaacctccctgcaacacagcatggtggtggccatggggcatcagctgatgagttaaatcatactccacatacgtgagcttagaaagcaggaactgtggaatacctcatacattttagaaatagttgtataaacccatatgatggaagatttagaagttttgcctctgcatgggttaacttcccactgaaactctaattcattcttgggaactaagccactcgaatagaaaagggaaagaaatcatttgtttagcttctactttatgccaagagctttatgtaaagagatccaaaagcatgaagttgttcagaatggatgtaagcatagggagatctgtgctgcagaaacatctgtatttacaatgtagcttattacccatgttgtatttaagtatttagccaaattaatctctttaatattagtcctgccagtattctttcctaacatgtcattgtggctgcttactttttatcagaagcgtttgaaatttctatgtaccattgatgagattctgcagtcgatgccttaaccagagttgacattcaaatacaatttattcaaaattctctggtcatttattttatatgtgaagaaaccagggacagacattatgcggtgtcagggwcttccctgtagataacagaagaagaatatgagaactgtctttttccaaatctctgatcttctttatagcttcttgacttattcaaaatatacttatattttccctgtttagccaacctcccacattcatatctcagtgtgtttatgtgctgaaccagtgagataggaaatctatagagtctgtgttccctggagtattgatattccctcttcattccacaggaacaagttcaagatgaagctcagcaccatcacactyagcattttctagaaaaaaaaatgttttttttcccctaggaaaaaaaagaaactcatcaatatacatcattagatttatatttagctaaagaaagatagtgtggattttcattacttttttccacaaatatgcatagcaggtttattctataaaaagttaagtagctaaaatatgtatcagagagcaattctgagaacacagaggatcaaatgagggtcactcacaaatctgctgcccagagacagctattgtttacttccagtctctttttttcctgtttgtttatttatttatttgagacggagttttgctcttgtcacccaggctggagtgcagtgacacaatctcggctcactgcaacctccatctcccatgttcaggcgattctcctgtctcagcctcccgatagctagaactacaggcgtgcaccactatgcccagctaattttgtgtttttagtagagacsgggtttcaccatgttggccaggctgatcttgaacttctgacctcaggtgatccacttgccttggcctcccaaagtgctgggattacagacgtgagccactgtgcctggccttttctgttttatttttaataaaattaaatcttactatactgctaatttggaattctaatttttttttagaatatgtttccatgtcatgaaatatttttatatttttattagctgtataggattacattttatgtcggccataatttagttatggataaacactgaagttttcttccttggccgctgaggaaacagagttaggaatttgagtgcaactccttctgcttctccttctcatttctatagcataaaaactctcaaaactggccaggcgcggtggctcatgcctgtaatcccagcactttgggaggccgaggcgcgtggatcacatgaggccaagaattcaagaccagcctggccaacatggcaaaacactgtctctactaaaaatgcaaaaattagcctgccatggtagcacacgcctgtaatcccagctactctggaggctgaggcacaagaattgattgtacctgggaggcagaggttgaagtgagccgagttcatgccaccgcactccagcctggttgacagagcaagactctgtctccaaaaacaacaacaacaacaaaataactcccaaaagacacaaagaaataacagagcagtgatggctaccatgagttctgaacccttcctggctgtttctaagcagcccagatgcaaaatgtccaacaatacagtctcctatcagaaaaaaaaaaaaagtaacatttaggacagatgattaggaatgaatcatgaaaacttggcttaattttttcaatattattttgctacaaaacgtaaagaaaaacaaccctgtcttttactccctctgtcatacacaaatagaagtactagattgggtgctaggagcattcttcctttgtcaaatccaatgagactccgagtgctgggattatctttgctgctttatctgtrggtgccaacgccaccgtagatggcatttgcccattgcaaggctttatcagtgttagacactgctgtaggagacaggaagcagttccagggctaatggcaatgaaacgagggtcagtatttctttttcacccactgttgctttgggtgggttttatcacttgtgtttattttattattactgagtgatagggaggggagcaaataagagagttgatgctttgcttccgaaatctatggagcctcagcattgtattgaaatgtcactccccgctgtgtttcatgagcctcccagcgctttgttcctcgggcagtgctgatcattacttctgcaaccataaattttgcctcctcttctacaactattttatgtcagggaagatgaagtgaccctctatttctttgtacatttcccctttccaccttccctatgattaaaaatacatcttgggtctctgcccagggttttcatagggttgctttccaaccatttttacaaagatagttgactgtttcttatatcagatatttccagagaaagaatgttcttaattaagatgccattcctgggaaataatctcaggacttcctgatgcagtttaaacttgttccatctgtcctcttccttaagggtgctaaaatgtcatattttattaaatatttgttgaaaaamccagttgcatattcacagtgatatctttcttgtggccttttctgtactacagaaaatattagtcagacttcaagaagaaaagctctggaggggaagggggcaggatggattatggtaaaatactttggaaattgctagactaagcaaatttaaacaggcttatctattgcatggctcctgggatgtatggtgaatgcccaaggggagggggagaacatgagcatttcccaatcttatttgacacaggatcttgttgcccaagcacctactgtattttctaccattctaggaaatgcagtttgagaaatgcttaatcttttggtaggaacccaaaggactaagacaaaatcatagacttgggatttgcctttctttatcagcaccacattgcagctgataggggaaaaggatttttcttctgcctgtacctcttggtaagttaggaatagtagaggggaacgggagggaacctgggccaggagtgagcacataggggtggggagggggagtgtaggtgccatgggcagtgctcaccactgaggcactcaatgatttgaaaagcattggttaaacaaacgaaaatcaactgagttctcctgaaaagccaataagcatctggaagtctgtactaaggaattgctatcttcatttccattcttagagacacctamattgatgctttcaactctatatgaaagtcaggaagcatggcagggaggaagggaggggaaaagcagggcctacatggagagtctttactaggagagaccagcttcatggaaatgacattatgcccagaaatagatggtgtttttaaaaatacacataagtagagctttaagttaaatcttaatgaaagaaccaaatcagaaaaagcagactggtttcttttaaaaagagaggttccggagcccctgctgtggcctccaagaatctagggtgttttaggccacctacatgggttctgcagagtcaggagtttgcatgcatccatctctaccctgttagatgtacaatgtggctccccccagcaaggcctactcacctgccagtggatgccgatcagcactggaaatgaattcttgccacagtgatttatcctgtggaaccctaaactaaatgggaaataggcagccacagtattccccaataaaaggaaggaagcccagtgaaatgtcatattggcaccaaagaaagatactgggtttacttgaatatgcaaaactttggccaagaatataccagatttatttaaccacttcctcaagttatttttctgggctgaggcaaggaaaaaataaataccatttttcaagtacagttacacaagtaggtaagtatgagatatttgaggtagagcttttcattctctgattacagattattttaaatgtggctattaaaaatcaatttccttttttgatatgcagcactcttcgtatctaccyatccatatgtctcacatatatatgcctctggccagtggagaaactgaattacaatgaaaaattatcttaaagatgccaaggcaggccttggctccctaatgctgagccctttgcactttggcagagaatttttgtcagaactgtcccaggtattcaaatgccattcttctgcattgttctataactccagctacagaatgaacacctgccaccacatgacccaattagacatcctagaaaggggtatccaatcttttggcttccttgggccacattggaagaataagaattgtcttgagccacaaataaaatatactaacactaacgatagctgatgagctataaaaataaataaataaataaataaaatttaaaaaataaaaataaaaaaagtttgtgcataattctcatgttttaggaaagtttacaaattcgtgttgggccacattcaaagccatcctgggccacatgtggcctgtgggccatgggttgggcatgcttatcctagaagtatctagtttgttatatgaaattgctaggaatgaagcatccatttcaaatagcctgctaactttagccttgctcaaggcatttagtccttttgtaatctcttttttgtcttatctgatttaatttgaacaaaccttactttacacttttcatatttttgttgcattttgttcaagaacattatattgcattattattgtatattgtaatttcttaaaggtaaaggcagcctctaactgcaaataaaacatctcaaataagacgtttcaaaaaataagaccaaataaggcagcatgttaggatctggcatcatatgtccctaatagtgtctagatttgttaatattggtaattcaagatagagttaagtaatgatatttatccagctaatggataaatcttcagcaggctccgattttgttgtatcatttaggtgacatctacataatccgatagcagatggctgatgagagcatctcagatagcttgcctgtgacaaacaagacaatatgtggattcagctaggtcaggattgtgtagaatcagccctagaagctgagaccaagacattgctgcataaacaggaggaaaaccactggtattctagcaggaggtctccaggggctgctggaccctccatagtcttaatgataaagcctgccttgtacacttaagcacatgactttttatggaagatgcatacccaagaatttaagtagtgaatttttttcccctcaattactgttggcaatygaatgtacagttgtcttgttctccctctgccctagtttcctagaactactgtaacaaataaccacagactgggtggtttaaaacagcagagatttatggaggctagaagcctgagactaagtggtgggcagggccatgccctctctgaaggctctcgggaagaatccttccttgcctctttctggcttctggtggcttcagacagtccttggcattccttggcttgaagatgcaccactccagtctctgcctctgttgtcacatggccttcttccctgtgactccatgttctctcccttcttatagcgacactagtgattggatttagggcccaccctgatctagtaggatctcatttcagtcctcttctaaaacctaagcaaagaccctgtttataaataacatcacgttctgaagttctaggtagacaggagttttggtggacactattcaacctactccaccctcttaattctgcttttaatttttattttttattctttatgagacagagtcttgctctgtcgcccaggctgcagtgcagtggcatgatctcagcttactgcaacctccacttgccaggttcaagcaattctcctgcctcagcctcccgagtagctgggattacaggtgtgcaccaccacacggggccaatttgtgtgtgtgtgtgtttgtgtgtgtgtgtgtgtgtgtgtgtgtgtgtgtatttttagtaaagataggatttcaccatgttgaccaggctgatcttaaattcttgacctcaaatgatccacccacctcagcctcccaaagtactgggattacaggcatgagccaccgtgaccggcctcygctttattttcttagtactccttccattcatcattcttcaataactattttaaagcttattaagaataaattttgttaggaatgcctatcaggcatatgagttatataaagtgctatattatttaactaaaccattaactttctgataaaatgacaaagaaatcattttttgcactaagatattcctaaattcatctttttatagaaaagttgaaagcccatctaagtatctaccagtggggaatagtttgatatagaaaatcaatgtgacatttcccatttactaaaaataattttcagaactatgccgatataatatatgcatcaatgaaaatgcaggttatataacttctaataaaccatggaaaatatgtattcatgtgcaaaaatgacacaaaaatatacaaaaatgcttggttaggatagatggatcatttaatatcttgctttattgattctttaatgtcttgctttattgattctgtaacttgttttaagtaattaaagtattatctgttattcctatggaaaagactaccagttactcctcaaaaatgccatatactctcttcaggcccccagactgattatatgttattaaaaattagcgagtatttgtttcctaaccacccagtcctgtgtgttatcactgaaatgtgccattgggattggatgcttggcaaaacatatctgaagtgagaatgtacagagaagcatagaccaagtatatctcctccaaagaagggcagaaaagtttaatggatacaagttaaacctcactctgcctcataatggtgtggacaagtggcaagaagaggcatttgggagtcaggcacaaagagttgtgctaaaagtctaggttggtcaaattgtgtcttcatgtgctgaaggaccttaatcatgcccacttcatggcatcctgatgacgatgagaaagccatgtggttctcctaacacagcatcacctcatggttgaccagtgaccacagggcagaaggatgctgagtagaaagacatgaattggcatcagaggagtcttctgaacattgcatttcctctctaagcaatggaggtagaccctgtgtctcctccagacactactgactgaagagagatgtcagcaccatcagcaccactaaaagtaatgttgggagccaaagtattgccatgagaatcaccgaattgttgtgaagagagatagcagcagtatgaatgcagagatcgagttgccacctcctgcaagcacctctaaaagtaatgttgggagccaaagtattgccatgagaatcaccgaattgctgtgaagagagatagcagcagtatgaatgcagagatggagttgccacctcctgcaagctgccacctcctgagcctacttgaggaacttagcgtcacaaatgggacaaccagcctttatgtccctcaatgtgatgcatataaagtcacagcacctcctagaagtatccttaaagaaagatgtcaagagggattgctttagactaaaattgacttaagagacataattatcagagacatagtgtgaaatctggtaccttgattcaagcaatgtaactataaataggggaaatattaagatgggctgtgtattatatcatagtaaagaattacgccaattttgttggatatagcattgggatggttggctccaaattaaatttagagctgcagagacaagttattaggaattaaatgttctgatatatggaattcaccttaaaatatttcaatagagaggaaagagaaaaaatgaaaggaatataaaggaaatgtggcaaacaaatgtttataattgttgggttatcatcataaatatatgaggggttattgtactgttctctccacttttgtgtatacttgaaatgttttgtaacaaagagtttaaaatatataaataaattcctagaatattaacttgccaaaaataattgtctgtgatttttttttcctgagcargatttaagaactaatttttccacagctgttgttgagaggcaaagagttcttagggatcatgggtgataaaaacagaccttctcacatgccactggtgggagaataaattgatgcaatttcggtggagtgcaatttggcaataactaccataggacaaatactcttacccatcattctaacttctaagaatctattctrtaaatatatgtagaggtatgctacgaaatgttcaaagacattcactacaatactttaatagcaaagaactggaaggacaagctgtctaccaataggaactggttaaagaaattatcaccattcagagaatggaaagtttaagcaacccttataattaatgtattagagctatattgccaatatgagaatgtttcccaagatatttgacattaaaaaatggtgcagaaaactatgaacccatttggagttttaaaaaatatcagaaaggatacaagaaatggataataatagttaccttctgggcgtaggattggcaggagagaaagttttcacttttcattttatatatttgaatgtttaccatgtgcagatgttattttattttatttgtttattattatttttttctgagacggagtctcactctgtcacccagcctggagtacattggcacgatctctgctcactgcaacctccgcctcctgggttcaagtgactctcctgcctcagcttctcaagtagctgagattacaggcatgcgccaccaarcccagctaatttttgtatttttagtaaagacggggtttcaccatgttgcctaggctggtcttgaactcgtgacctcaggtgatccacccttctcgtgttcccaaagtactgggattaccggcgtgagctactgcgtccggccaaccatgtgcaaatgttattttctgttataaaaaggaaaagaaaaaaaaattgaaacctagagaattatgtgccccgtgtactgagaatgttatcttaagaattatcctaagattgtaattaggaaggcgattctgttagggaaaactttataaacttacacagtatttaaaatgtataaattatggatggtttcaagttaacaagaataattttgccttctatagtatgagtaaattgtgcacgattatatgaaactctgaaagtacttggaaatcttcaaatggcattaatataaaatattaaattctactatcttttaagttcaagttatacctgagaaaacactagagaaagatttcattttgtctaccatggaaccaaaattggctttgaatatgtattatccttctgtatcgaaaaataagacctacctgcctcaggtactttttgtgttcatcatctcattgaattatcatgattattctgcagggcaggtggtatccaccctaatttccagataaagaaactgaggctggggacattaatcaacttgctgaaagtcacacacaagtgaagaaacagtctagaacccacacacttcactcagtttgtcctgacactttgcctccttcatatcaggaaaaactttgtatcaggaaaaactaaataaaaaaatcatctggtctttggcccttgcttttaactcctttcttgtyttctgcaactagctgtgccttcctcagtgtgtcttatgtcctaggaaaagattattaacagaaagcacaacaggtatccaggattgtagtttattaagcagagttttaatgaatattttcagtaaaacagagaattaacggctcattgggtttttttttcccctagatatcgtggatgctttatcagatccaaagaaatttctctcaattacagaaaagagagcagaccaaatgagagctatgggcattgaaactgtaagtagaaatggttgattaaaggtggccaagttgtgggagtttgattatcaaacagtgtttacaaaaacaagacaaagtaatgaattagcaaatttaaggagggtttttaaaactgagctcatcaattcaacaatagttaactttctacaaaagtgtggcatgtttaataaaatgtgactgccatcagaaaaatccacttcatcatcagtggcttaactcacatctggggaccccttccccattagaaagaaaatgcaaaacatttgttatacttttgggaaagtttaaaatgtaggtggagcatttctaatcagaaaaatgcaacatccgaaaagttccaaaattcaaaaccttttgagtgctgacattggatagtcatacctttgctttttgaagtttcactgtacataaactttctttcatgaacaaaattactaaaaatattgtataaaattaccttcaggctgtgtataagwtgtatataaaacataaatgaattttctgtttagacttgggtcccatccccaggatacctcattatgtatatgtaaatgttccaaaatctgatatccaaaacatttctggtctcaagcatttcagataagggatattcaaactgtactgtacaggatgtttctatgatacactgaaataccagttaacctagttcagtgaattaatgataattgctttttatttttaattatttattttttaacagataggatctcgctctgtttcccaggctggagtgcagtagtgtgatcatagctgactataaacttaaacttctgggctcaagccatccttccacctcagcctcctcagcagttgggactacagatgcatgccactgtgcctggctaatttttttactttttttgtcaagacagggtctcactctgttgcctaggttggtgtcaaactcttggcctcaagcaatcctcccaccttgacctgccaaagcattgaaattactggcgtgagccaccatgcccagccaaaatggcgtttattattgatttttcactgtttgccagccttacatcccaaccttctcccattccagtgcacacgtggattgtttctttgtttttaaatgttctctttaccagactcctcagtttggaatggatgtagcatctctccaatagctagaaaaagagaaagtattctctgcttgttaagaagttggatcttctttccttggctggatcctttgcctttaagagagtagaagtctaggaagagtatggtagaagtttactggattcagtaaaataaagaatgtacaagatatttgaccttgagtgacattcatttgggtcaatgtaaatgtttctgttccagagtgacatagccgaygtgcccagtgacacttccaaaaatgacaagaaaggaaaggccaacacygccaaagcaaatgtgacccctcagagtagctctgagctcagaccaaccaccacggctgccctggcctctggtgtggaagccaagaaaggtgagagagagccgttgggttccttatcttctgcacccaccttaattacacagtgtacaatatctatagckttaggaaatatataaattcgaagttctttgtgggaaagaaccttttacatagtgatgttaactaattcatccccactctcttccagaccctcccataggtagttacctggacaggccgtgggctcatgaaccaacatagttattcctattggacatttctaaattctcatactgataattttccctcataagtagaaacatgattatttgtttgtaaaattatcaaatgagcacttgaaggccaattccatgtgcttacctgtagatgaaacaaaagatcattaagaggtggcatcacaaagaatcacgtgtctcatattcagccagtatgtagggaaacaactgtgctggttattttaattggtttccatatgaattggccagacatccattgattggatggtgcccattccatactggagggaaagtgggcagggagaatgctgatagggagtggcaaggagttcatttttcttgttctggaaagaattctggggtcatcctgagaaggtcatgggaaatgagtcaaaggagtatttgaagaaaattatagtcttggcagaagaattcattgaaagtgggcatgctaagggcaaggtaagaattatgatactcatgcttctgttataacacacctatcacattgtgttaataaagtattaacaaccagagaaagaggtyattgcagatgagaccacacctcatcatcagtgtgtccctggaaccatgcctagttaaaatctagtagtctattttctcaggaagtaaagyrctgtttaatgaatgataggggcaaggaaatctagattaagttggaaattgtcaaaaggaaggaagaatagaaataagttggcagcttgaggccaggtgcagtggctcatgcctgtaatcccagcactttgagaggccgaagygggcagatcatgaggtcaggagatcgagaccatcctggctaacatgttgaaaccccgtctctactaaaaatacaaaaaattagccaggcatggtggcgagcccctgtagtcccagctgctcaggaggctgaggcaggagaatggcgtgagcccgggaggcggagcttgcagtgagctgagatagcgccactgcagtccggcctgggtgaaagagggagactatatcttaaaaaaaaaaaaaaaaaagaaagaaagaaataagttggcagctttgatatgggccttaggcagaaaggggctttttggtaactcagacttcaaggacagatcccagagatagattgtaccattgagagaagtagaggagttaggaggaggagctgcttttggtaaggaagatgattttggttctgtatatcactgaggacaagctgttgctgatacatctgggcagaaatatgcaattaccaaatctatatcaggtggagaagaagaaggagggacagagaaacagaataagaatacttagaaggcagaatgaatggggaaaaaagagaaaagagagatctatgttctaagaagaattagttttgagaagatgctgtagacaagtccagagaagtgaagactacaaaattatagttgaaccaggggtgattggatgatgaaggtagaaacatggttaaaaaaatgtgagacataatttaagacataaaatggttgttctggaggacagtagcatgttggtaggaactaataaagaaaaacaaggaaaatgcaaaagagagtacatggtaaaacaaggctataaggaagatctgaatcaacagaaagggtgaaattcagctggataaggaaggaagagatatgttctgtctgagctaagaagaatgatgagtgaatagaagtttcaggatagacaggaagaattcttgacagacggtgtatcagtcagcttatgctgcataacaaatgacctcaaattttagtagcttaagacaaccaccatttattgagatcatgtttcattgggttggttggtctaagctggcttggctaatctctgtgtcttgcttatgcacctgtgatcagctgataggttgactggaaggtagatgtgggatgaccttatgcacacatctgtcatttggcaagttgtttcacattatcctgaagcctgagcaggcttgttcatatggtactccctgagtttaaagagcagcccttttccagcctctgctagtctcccattggctacagcaggtcacaaagtgaaccaatattcaaggggtagagaaatagactctacctcttgattagaggagaaagaaatagtggtcatttttgtagtataacacagatagattttatctgatctaagaagttggttaggtggctgctctctgctgagaaacgtagaggtagaactgaaaaacagcagtatagaaaagctttggagttgcccctggctggaatagaatgatccacaggaaataaggagaaggtctgccacatagcacacaggaccctggtgagggttggtggtgtgtactaagttgatgtagcttgatctcattacttcttcagcagtgcccagaaactcagcaacaactgtggacaaagtacagcttagggagttgcaagcctgaaattatcacaatktatatggtctgggaccaaaagtttgaagaccattaagttatgacactgtaacagttggctattgatgtgtaacaagcaatcacaaaagtcagtaatttaaataagtaagcatctattatagctcatgaggttgtctgggtggcttttctggttatgggaggattagtrtcagtgactcagctgatcttagctatgcttattcaaatgtttggggttcagctaaagtgtcattggctgggacaagtgggctgtcttccttgtggactctcatctttcatcagcttagcctgggcttgttcacatggtagttgcagtgttctaaaatggaggtgaaagtacagatgctccttgacttatgacagagttacatcctcataagctgaacatatcattaagtcaaaaatgtgtttaatatctaagctaccgaacatcatagcttagcttagtctagcctattttaaatgtgctcagaacacctacattagtctacagttgggcaaaatcatctaacacaaagcctattttataataaagtgttaaatatttcgtgtaacttattaaatgcagtacagtgtagagtatacagctgattgggagctgaggcttgctgcagccccagcgcatatccctagcttaggaaaagatcaaaattcacaattcaacatatgctctctactgaatgcatatcacttttgcttcatcacaaagttgaaccactgtaagttgaaccatctgtatgtcaggttccttgatgagtcctagacttagaactggcatggcatcctttccactacattctgtcatcccaagcaagtcacatggcccagctcagattcaagagttggggaaacagattccacatattgatgggagaaattccaaagtcacatgtaagtaggtgtggaaacagggaggggtggaattttttggccatttttgcactcagtctgccaccctgatcataatatataggttaatgttccagtggggtagatactagaggagagagacttttctaggaaaggaaaaggttaaagggaaccaggaacaagatgaaagtaaaaagcttgcttggtaggtgtgagggagtgagtgaagttggcaggatggagattgcagtcagaaagaggttactctaagctacttgtcttggaggaagggcagtttcaagcagtgttaacatcccgtttacaactgtcagtgggaggtgaggtaaagtagagatgaagatttctagaatggaaggcatcatgaaaacagaaagaaaagtcactcagcacattcttctcatgcatattgaatcactgtgttggacgtctgggaatgcctgcataggaaaaccacaattcagatatgaagttcatggggccgggcagtgtgtgacctaaaaggacacatgtggaggtagttaggctcagcagagcctggtgtaagtgagaggtctgttcttttgtatgatagtttttaggagaatggcatggaagtacaagagagaagtctataggtgttcttcccacgcctctccatggattggggtggggtggggaataaactctactccaggagcctttggggraagtgatgtcatttgagaaagcaagcctccatttctttccagaaaactgtcttaatttgagtcaccccaaagaccctgagagaaggcttccagtgcaagtagtttattctgggaggcagtggacatggatagagatgtgaagaagtgacaccagggagggaaggcagccagtaattagaatgttttaaagccagttgccagtaggcacctggaacttaatgccctggagaaactctgggggctggtattggacatacttctcagaggtctcctcttagagggatgagggagctggggaatgtataccctgactcctgtcagccttttcttgagggttcccgtggaagggataaattctcggcattcagacgctggcaattggaagtgaactagaagagctgatgtagagagggcatagtgtgtggctggagcagacggcatttgctgcagacctctatgaaggtggggaggtgtgaaattccaaactrtttttcttagacattcagccaaacagcaacaactgcaccaacacgactttwtttttttttctgattttaagaacaaaggattaagaacacccagctcctaacttccagattagcaattaagagaaaacaagttattgttaaggaactatgctgatatgaacaaaaactttatgtagtgaaacttcaattagctaaaacccaaaatgtgctgcctaacctactttcataccagggaagcctgtagacctgcacagtcctatatagtagccactaaccacatggggctaccactaaccacatagggctatttgaatttatttaacaattaacttaaaagttaaaccttgagttcctcattcacactagccacatttcaggtgctcaagagccacagatggctagaggccgtcagttggacagacccacgcrtggaacattcccattattgtgcaaagctctatgaggaaggctgttcttggcacgcagatggaactgtcctcttctgtagagtgtggtttttttttttctaactaaatcacttatgggaatcaacatttttacaaattgtgtctttcccccaaaacacaaaaccaggtagttgagggaagtttatgtttttgtaggttccttttaatcaagacttagttgaaccaagacaaaaagaaaataaaaattgagagagagagtgtaagtttcatcagactgggtcaaactcagaatttgctagatctctggaggaccttgcatactccccaaatcctgtatgttcattttacagatgagagagctgaggcctaaagacagggagctctttgtgtgccaggagtcactcccttgccttaccctgcctcagtcactagagagacagcttgtgaaagccaacttaggagatcagtagagagccccatggaccctttataccccgatcataaaatgttacagatcacaaggctgatttccctcagccaaaactttccttctgcggcctgaccaccctatcattgaatgtgcacatcttaaaatgaataaaagggaaaaacaagagcctgggacttgatgcctatctttcttgaatatatcatacctagcctttgggattctaatggaaatcaattacagcacagagtacacattcattttgtttgcctaagatgaaaatctgcagtcaaacagaaactgtttgaggatctggctacaactgttgttgccatgacaacacctggcctagcatcactcagatascaggatgacttagtgtattaccctagctcctcctggtatgctcctgttatacactggtttgattttattatttcctgtatgtttaaggcattgctgtgctcaatagcacattgcttaaatgctaagattgaatttggtaaaagggagaagccagaaaaaaatgttttattctttcacaatgactgaattgagaatagagttgggaattagttgactggcatgatatgccttgaaatacaaaggtaagaataaggataatagatacttttgtgcctgatcagctcccctttatgggttcactatcccatctcacagctcctatgaattttggctgattgggcatttcagctgcccttctccatagaattgccctgggaccatgagagttcccttgcctgaaaggttttgtgaaacctctgtagcactcagctgattgatccagggttacaaatgcccagcctctttttgccaaggtggaatgactcttgggtgccatttgtactgaagagctccctgcaggatcagactgaggctggatttctactggaaacacaccctaccttgttcctctgccctgctccacttctttcattcccttaggggtttctcctgagagtctgccctcaatcaatcacttgcacatgaatccccttctcaggctctgcttgtaggaaacctgacctaagttaagacattcaacatttcaattgtccagttaattgctttgtaataggaacttaagatgtttatattcatcatatgtaaagctgcttcaaagtctttcgatgagatttcgatatgtcagttctatattaccagttattctctctgatttttagtatacatagtgacttaattttttttgtttgtttaggtattgaacttatccctcaagtaaggatagaagacttaaagcagatgaaggtaaaattgcttgactattttgcaagcactcttgtattacacatattggtgacaccaatatatttttgtttctcaccaagtgtaatcattgtgattacaaaaagaaaaaacaaaaaacctatttttgattctmtttttctcccaaaggcttacttgaagcatttaaagaaacagcagaaggagctaaattctttaaagaagaaacatgcaaaggtacagtgctctamagctactattttgtgttatgtatggatgaatcatttgtagccaaaaacactactttgaagctgataccagaccacttaacagtaataactcattctaactggttaacaatgaaattaaaaaatagaatcggtttgggagtgcttgtcacttgtttgtagtctgcatttctaacaattctttcaaatgcataacaaagcttcatccatttaaaaattgtttcactaggccgggcacagtggctcacgcctgtaatcccagcactttgggaggccaaggtgggtagaataggatgtcaggagtttgagaccagcctgaccaacatggtaaaacctgtctctactaaaaatacaaaaattagctgggtgtggtgacatacccctgtaatcccagctactcaggaggctgaggcaggagaatcgctttaacccgggaggcagaggttgcagtgagctgagatcgtgccattgcattccagtgtaggtgatagagtaagactccatctcaaaaaaaaagaaaaattatttcactaataacatgactatataaaatattgaagaccagctcacaattctagccactagttacctaaattgccaggtcactgtcacatagtttgccatacacactggtgcatggagggagatgctagcaatctgtcaacctcccactcacagcacctagagagagaacacttgtcactttttctcccttatgtaaatcttgcccagtagcctacttctgaaatagatttatttttgctttttacccataagaagtggtattttgacagtgattgtgaaaaattacragagctagttgcaaattgtaagagaacagcaggaggtggccccaggaattctcctgtgggttgaaaaacgtcatggccctcaaacatygtcacttccagactccctcacaggtaaagaagaaaaaggtagtacctctttccttcctaagaacatataataaccagctgctgctggtaggataatgtctgtcctcttttattaagggcaatgagagcaagagaaacttaatttataatttattaatttgaaagaacttctgagttcttttaaactaatcttgcattcctgtttctttattctctgacccaagcctcaaaccaaggcatgtccttcagaacttggcttgagtgatgtaccttttaatcattccacgtattgagatgccgagaacattgtctggaaccctgtcccctgtcatttctttaagagtttgtgctaacactgattttttgagaagtcatttctttaagagtttatcctaacactgattttttttagaagttaggcctaatcttatcctagtaatgttccctgtattacagaactgttgggctcaatggatttgctgatacagtcacttcacttcaaagactgtttctaagtttcatgaataattccattcagtgaaattccttacattgctcaatggggttattggagacagaacaatttaaagtaggggcttcaatgttgttggttattgacaacaggctgaactatggaaagccaacagaaaaagagtaagaatgagaaataagagagaaagcaccttaaatgactttaattatttggaatagagtggatgcccgtatgctgcagcactatctaacagatttttcttgcatttaaattggatctcttttattgagcagacacctcagtggcctttgggctagttggaaacataaagattttggcttcatttaatattttcttgaggcatggccagaaaatatgctgtggcgggtggtaataatagcagcaataatagcagctagaattcctgcatgctcagtaattctcagatgctgtgctcagcaccttatatgcattgtctcatttaagactctaccctgtaaggtaaattctatgtgagtctccatttatatgtgagggaattaggaattagtgaagttatctgatgtcccagagttaggaagcagcatagctgatatttgaaccaaaatcaagagtccagaatccatagtcttgcaccatactcctgtgtaggatatgggatgctcactaagtggacaagttccctcattgggtcaaatgcagtgacagcacatgggacattagggaaaatcactatcaactttgggcagtgttgatatactgctgattatcaggactgtgactaaggaaggatgcccctcaatttttagaacttaacctacatcagagttgtccattaactccctggagccatcatgcccggcccaagctaacttctaagatgaagaatataatgaatatttacttgcctaatatacaccgatgccagctctgttaacatattgtctttaggcgagacatggtggctcatgcatgtaatcccagcactttgggaggccaaggcaagcagatctcacctgaagtcaggagtttaagaccagcctggccaacatggcaaaaccctgtctctagtaaaaatacaaaagttagccaggcatggtggcaggtgcctgtaatccyagctacttgggaggctgaggcaggagaatcacttgaacccargaggcggaggttgcagtgagctgagattgygccactgcmctccrgcctgggtgacaagagcaagactctgtctcaaaaacaaaacagaacaaacaacaacaacaacaacaaaaacatgttgtctttaaaaccaaaaaatgaaaaactgtttaaggagaggggaacaatgtggtgaatctattaccattggacatacttcatgcctgatctccatatgacgtgtttatcctaacactgatttttctgtcagtcaacacttttaaagtggcaatactagcttgtacatattgatacttgcttaagcacatattcttaggtattctcataacagttatataaaggagtactataattatatgagttttgtatctgttagcttttgcagggtaacaaaccaccctaaaatgtagtgacttaaaacaatgaccatttatttggctcacaattttgtgcatcagtagttggagctgggtttagctggatggttcttctggtctcagctgtattcactcatgaatctgctgttactaccagtttggttggcagatgggggactggctgatttaggtcagcctctgttaaaccacttcctctctgctttatgtggtctcctgtcttccagcaggctagtccaggcttgttcacatggctggggtcctgagagaccaagcagatcaagcatagtttcttgtggccccagctcagaactaacacaccatcacttccacctcattttttggccaaagtaggtcctaagtctggccttatgaggtctctaccttttgacaggtgacaaagttacatcagaagtgggagtggatgcagaaagggaaataactgtggccatttttatagcctaccggctattcaacagattagcttattaatacttaaaaaaacacagcttcattaaatcatctagtttttaagtggtggagtcaggatttgaaccaaattcagcccggcttgagaactcagacttgtaaccactatactcagctgcctctgatgtttctcacactaatttttcttctcttcacacatctttttctttatggtctcastaacaggtttttaagagcaatcatgaacctatcagggcacaaatatcttgggttccttcaggactggtttttcaacataaggtcattgggccaagagctggaggctttacaaaaatatgtattcttatgcctrtctgacacttagctatcatctctaagaaaagartataggaaatacagaaatacattttagataaactcctctcctctgcatgctaaattttgaggactgtttttttaggaacattatgtagcactttttactatcttttgrgcccttagtagaaaccccactaatcgcctgcaaagacacttatcaagcctccttaaagaaacagaggttttatcctcttgccacataatagtaagaattaattcctacatcctttctgtgaaaggacatctacagctcttttataatagttttcagccacccaacatggagctaaggcttaccaccccaaagccttatgtcataaaatgacctgctgatgaagaaatatgacctgggctgcactctccctactagtgtgcccctggcccaaacagcccttggtagctaagaacagggactattatttagtctatatccagcaactgtagggagatctcagctcttacatatcagcctagatcaagcttgtccaacctgcatgcagctcccaggccacatgcagcttaggatggctttgaatgcagcccaacacaaatttgtagactttcttaaaacatgagatttatgcacagactttttttttttttttctctcattggctatcattagtgtcagcgttttatgtgtggcccaagacaattctttttccartgtggcccaaggaagccaaaagatttgccactgctggcctagataaataattctactttttagacttaaagagaagcagagaatctatgaactatatctcagcagtttaagaaataaatgtatggtcccaaggagagcttatttccaaacttgcaggttagctaccagatagaaaggaacagtggggtgagtgtgaggttctgccatttgcaaataggygtgcaatttgctgttaggatattgagaagawaagatgggggtaacgaccatttgcaccccagatggatataaaaatgctcattaaaatgtctatttttggaaaatggcaatgatcaactgcmtttgaccctctgaatgtactggcaatcaaacttctacttgtctcatactttctagaaccacttcaattcgaaatggaaactagggtaatggtttttcaagtgtctattatatgagacacagaaaaaggagaattaattaacaataatcctyccccagcacatgactcattgggatccagagctgcagttactttcattaagagacaggcatgcttttcaattgtccartgaggtcaattccttagagccaaaaatgtaaaacccaaagttggatacatatctccagtaacgtgttagaaggggaattacaattcaaatgcctatggggtccaagcaggaagtagctgagggaagttggacaggtgttgactccataaaagctgggagcactcatctctatccacaggccaagtcagtctgagctaccaccattggtgcctggagagtagatgggtcagtcgtgtcctcttaaaggagagtcaaaaaatcagaaagcttatctgaatttcctgatcttttactatcggcgtctaattcaacctctttttgaaactgcgtaggaaaaaacaaaacaaaatccaaaactaaaaactacatctgcaggcaggatacattccttaggccaccagtttgcagtatcaacattaaatgagtcaaatgaaatgcctgagaagcctactaaactctggcatttttagtaaagctactgatggaaaattttctctttgctatgcaagcaatttagccgacagcaccaagactgttgttaaactcatcaattttaattcatggtcagaccttagtaccagacctataacttagttttgcagtggaaaggggcagagacacagcagttgccctcagagtccgcctattggtaatctcagagttacatgctgagcaaacatgatttactccaatttttcagcaccctctgtggtgcgatcattcacgcccatagtcacatcagtcacaagaatgaattgcagcagcagttttccccaaaagaagctgaatttactcttaacttggataagaaacgtacacaaattcttctgaatgctatacatgtttttccccaaaatgtcccagttaagatttactttaagttaacacatttaattttggtactcttggcttgaatgaatgagaaatgtatgtctcttcaatagtgtttcatgatttaactaaggaccaaaagaataaaaccaataatggacattttttttaagctaagatggacttagagatcatttcatgcctccttcattttacagcacaatgagctgagacttgaccagagtcacatggaaatcagtaattaggatccccatttctttctgaaaggacaagtggtgtctgggaatcaagttatcccaaaacacttcagcaatcactgcctaccacacagggatggagttttgaataaaaagagaaacagagacaatttttcaggaccagctttcctgttactgacattaattatagtcactttaattcaatatgctttcagtttttcaaattatttttgcatatgtttagtaaccttgcatctcataagcaactcatgaattcggttaggcaaaggtacctaactcagttttcttttcttttcttttctttttttttttttttttttkgagatggagtcttgctctgtcatgcagtggcatgatctcgactcactgcaacctatgcctcccgggttcaagcaattctcgtccctcagcctccagagtagctgggattacaggagtgcaccaccaygcccggctaatttttgtatttttagtagagttgggtttttgccatgttagccaggctagtctcgaactcctgacctcaggtgatttatgcgcctcagcctcccaaagtcctgggattacaggcatgggctactgtgcccagccctaactcagttttctaataaagacattgaggcctgggaagatttatatatgttacacaagggcagttgtttaattattggctgagctgggaccagaatctaagtcctcttgctattttcctatgctgactttttattcatgcgataaatacttattgagcatatactttgtaccaggctttgtgccatgtactggtaaagagaaaagacctgccctgctcttgtagagcatattacatagagttgaatccatcataaacaactttgtggtacaaagagccctattcctcatatctaattggattaataaggttcaccaaaatattttcttaggaaaaaaatctgtgtcaatttacakccaagcctcaaagtctctacttgtcctgttcygcactaaaatatttaaagaaatagccttcaccctcctttcaatgatatttgcaagataatataggactgtggcacttctgatatattttgagacctgcagaaagccccttatttatttaattttttgcccaggaaaaattaacacatgggttagccaaccataatgatttctaaatcttagaaagaagactaggaggagggcattttagtaggtaccaaagtattacaagagtagttaaatacattcagggatacatcaacatgttcctctattcctggggcagtagatcaagcatggaggaaacatttattgatttaattagtctgattgatatccctatctcaagtcactctctgtgtgttatcatgggtattgaatagtatagataggtttgtatgtcactgtgttttgaataagctgtaacacacatttgatacattagattcacttttaatcctaacaaccctatgaagtaaatgtcactatcccaattataaagatgagcatactctggaaaggtaagtgactcaccccagcactgaaaaacccatgtccttaacccagtgccacattgcagaagctctggaggaaatgtgtttatagcacaaaggtgcacacacattggtaatatggctagatttatggggcattccaattacaaattaagcccagatccacagcaagcccacctagcctttgttcccactgtaagttcctatgttgggaatctccctatccagcatcacccttctccactccttctcctaaagacaagaatgctgaggccttgtgcatgaatgcgtttctaaagaatttatatataaatgaattgtagatcaagtcctgtgttaaatctcttagctgggaaattaaggaagtcttggtaaagacttaaaaattccttccccatttatattttatgaaaccgttaaaagaagttcatgaattagatttgcataaagtcaagcctaccttagaaagaaaataaatttgcttttaaattaaggcactattttcttcaataagtgaaaggaaatatgacggtgagaggggttatataacctgaacaacatgtacacccattccagtcatgaatagcatcccatttttctggttctcaagagtaaggttaggctataacatcaagtgtcatttagagttggaaatttctgattgtactgatttcctctgtgcttgggaggctgagcagctaaagaaatctgatttcatataagtcattggctgtagctaaatgcctttttcattgtccaggaagaaataatgtttatattgaaatacctactttccaaagcattgcagccccaatttcaatggttacgtgaagcagatgggaaaatgttttaaatatctgtaaaacagaaggccatagctcctgaacactttatcctcataaactgcttctagataagtaagccagtgaaaatattaagtgatgtagattcaaattcagctgatggtgacaaacacagtgatgcctctcattatataataatggcattcaagagctccaaaatgtgcaggtgtttagaaaccatgtcacatgatgaatagttacatttagcatatacaagagaagaaacatggtggctgaacttgcatgtttgaggaccaatgtgtggaaggggcagtaggctaattacatgtctcaaacagcagaacaaagatgaatgggtggaaatactacagagatgtgtatatgtagaagaaaggacttcgagatgattggcactacccactgctgagcaggagtgcatttgaactgggcatgttcactagactgaggctagagactcccatgttgggaatgcccttggacaaaaaaaccggtgttgaatgggagatctggagtctgtactgttctcagatttggttattccttgactttctaaatgaagactctagggaagctggtgaaagttatgccagccctatatggtgtgagccatgctaagagtccaattcataactgcaaatccttcttgttcaggaacacagtaccatgcagaagttacactgcacgcaagttgacaaaattgtggcacagtatgacaaagagaagtcgactcatgagaaaatcctagagaaggcaatgaagaagaaggggtaatactgtttatttccttctgaagactttctctatgtttatattttgtcttttcccacagttttgctgctgtttaggtcaaggaagaacttagtgttgacttgattttcatcattaaaaattattcctgggaagtaagaaactcattcattttaaatgctctaacatcataacaggtcaatgagtggatgtagcttctggtttggggaaggttctcagcagagattctgatatcttttaattcatcataattatttctaatatgagaaagaaatcttagcctcaaataattgaaaaaatacctctttactctgagaattgattgtcctttttgattttgaactaattttaaatttacagaaaagtttccaaaatactacagagttcccttatgcccttaactcactttccctaaatgttaacatctcacataatcatagtacagttgtcaaaccaggaaattgacagtggtgcaataccattaaccaagccacagtgatttttcacattttaccagtttttccacaagtgcttgttttccactctgggatcacctccaaaattaaatagcatttagttgtcatctcagtatgtgataattcctcaatctctccctgtcttttgtgactttcacttttgaagagagctggtcagttgttttgtagaatggctcttcttttggatttgtctgatattttctcatgatgagagtgaggttatgcatttgtggcaagcacaccatggaaacaatgctgcttccttctcagtccacgatattggggggatgggggtgtgacattgatatgtcccattattggtgatgttaacctggatgacttggttaagctggtatcttacaggtttctgcactgtcagattacttttttccctttataaatactttggggaaaattccatgagaccacgcatacattctatttatctgagaaattatttttcctgcctttgaccttctccagggattccctctggtttttatctctttccttcaatctctgctgatgtcttctagttttccacaacctttggcacaagagaaaaggagaatgagatttctttttcctacttgggttttttggcatttggtttttgttttttattttttgttttaacagtcacccaagatatacctagaaaactaaactctgaaaacagaacagattatgttagttataattttcttggacattggttcatattgccgaaatttcagatcccaagatctaagttcatgacatgaaaccaatgtaatttgcttgaggagtaaatggtgggtaactaaaatgcctgccctggtatcaggcctcactatttgagaggtaccctcatttttattaaagttgtatttttcagaaaaatacaaatcaggcactgattattgagcatctgttattatgcatcatctgccttttgttttccccgtaggtttcactgtgtattattgaggcagaaatgtgcctgttgcttagaaaacattttgatctgtattttaagtgagtaagtgagtcacccacctcggagctcatgtggcaatattggtagtgattacagtaagttttgaggagctgtgattcttctagattctaaccacatcagctttggcctatttcttttttgtaaattaatttctcatatttaatgacattttaggctataatattgaaactgatggtagacagactctaataccaaggagcaaattgttgatgactttatagtactctccaagaataaggttatttgtatttacaagatatcttttcaaaaaatgtttcatgcatttttgtggatcggtgtatttagaaacacagttttggcttaaccaaaccaaaaatttttattaaggagatttcagatccaagcaccatagagtaaatttctttgctaaaaataatattacagttttctgattcaatcaatcatgagtgctacctttagaaatttttaaaaaattgataaaatatatctttacctcatgattgtttttactctcaaagataatgtgggatcaaaatgtaatttattataaacttggtaattattagaagtgtccctggtgtgacacttaaccccccaaacaggctattgagtgctcttggaggtctctcagcaaataaagccctgttttatcctaaacgtagatgagactggaaaagtctaatctgtagatttcttcctgagcctctgctgtcaaacgcagcactcctagcaggctcttcacacagagcatttccaagtactctaaagagtagaatcttagcaatacattaaaagttacttcaaaatcagacatcagatactttcttctggaaagccatatctgaggagagtttctcatcattaatattcaccatgatatcaaggttgcctggacttagtcttgctatgttgcccaggctgaagtgcagtagcrcaatcttggcccaatgcaacctccrcctcccaggttcaagcaatcgtcctgcctcsgcttcctgagtagctgagactacaggtacatgctgccatgccggctaattttttgtatttttaatagaaatggggtttcaccaygttggccaggctggtctcgaactcctgacctcaagtgatctgcctaccttggcttcccgaagtgctggaattacaagcgtgagccactgcacccagccttcctggacttttaactgcaactgagttgctaaaaagttagtgaaaggggaaactgtgacagtccttggagctttctcatgcaggatctatttttgaaacaaatgaaaggtttccccttactcttacctactcagctgaaaggaaagattgacctgggaaagggaagctttattcaagtgcttccagctttggctaatgactacctctcatatgctttccactcaaggatctttaaggtgatggtaaaaagatgaatgggggaacaagggaagacaagctaaagttgggaaaattctaaattacagaaattattttgcatagcccgaatataaagaaggttgatgcactagaaaggggaaaataaaatcttgattttcaaataaatattacaagtgcatgcccttatgccctcagatgagagtgttgaataaaacctctcattgcatttactgtgaaagatttgtctagaattaagtcacgggaatgtttcggcagtgctgcaaacttattgaataacagaagagagaagaaacttgctcagtgccagccattgagaagtgctagatttgatgcgagaccttgcatttttagagtaatgcttctctcacaggaacttggaattatattataaggaagcattctgacttgagctataataacctagagtatacatgctgaagatgaagctcaggacctgttcttgtttcagcagcgatgtggatattccaaaaggaagacataatcactgaaataagcagtaatagttgctgggcactcgcctagcatatatttcctactcacaatagaataagaagcaaaaattgccctgtggtgccaaggattgctattttctccttcactggcatatttaaaagacaaaaatctggctttataatgaaatggaagaatgaaaaattcacttcaagtctgaggacctattttccagttttcatcccaaataatattttattgaataagtgaaaaatagcttgagaaaaacaggaaccaaaatggaaactgacaacagccccttaatgatgaaataattgttaggtttgaagtgcctctttgtatagtggttgaattgagtaatcatgaaacagataatattttgtaaggtgtgaatctattactagaaagaccagtgttgcccaatgagccatgacatctcatatttgatgaatatattatcttcatcagaaagctttgtagcaaagacccatgggaatgggaaaatrtctaatttctggcatgcatttgcaactttccattttcaggggaagtaattgtctcgaaatgaaaaaagaaacagaaatcaaaattcaracgctgacatcagatcacaaatctaaggtaagaaaatgcccatttttacagcagtgacttgcrgaagacactttgtaattttttagaaggagtacctagtgtaaattagaaataacagtagcccagagctggtctagtagcctgcagctgatctgggatgtcaggggagcccagggttcatgtttgcctcagactcactggctttaagaagagccatttcatggaacatcttcttttgtcttgtctgttgaactatgctaacaatatttatgttgcctgcctcagaggcatcaaggaaaataataaatgaagatactaaaaggaaatattatataaaatacagaatatacttccctatagaaataacattaaacataggacagaaaaccgcccaaattgggaggtgatacttactccatcctaactttacatggaaatttggaatgagaaaaaattaagagctgatattctaaaagagaagcctaattactcacattttcttaaagacaggagaaaataggagcttgagagactttaatcaactttgtgggcatttggagaactaagtgttaagtcccagttaagaatgaaaacaattcttccagcaatgatagtttttaaatgaaaaggaaaaaaaaagaaaaaaaaaaccaacaacaactgttaaagaaagctcccaaaaatagctgtggttgaaccagccagcctcatctatctatatgcagctgtgtcatctggcctaatggccctgctgcatgcatggagcaggcaagatgttcaagatgttcttggtagctgtatgttttgtagggcatgaactctatagaggcagtaaggcatgtgtctttaagagttattccccactctctctcttcttaactggaatgtttgagaattagtagttgtgcaaactgtcatgattcttagatgcttggcatcaataagaaaagccttggcaacagtatcagtttgcttttgctatataatgaactgtgtcaaagaagagcacattgaaacaactactacagtttattaggtcacaattcagtgggtcagaaatttgggccatacttctgctgattttggctggagacacttgtgtatctactgtcagcagggggcgtatggccttacttatgtatctggtagttgtctggctgttgcttgttttcctacatgacctatcaacctccagcaggctagcacaggctcagtcagagggtagccacagggatcccagcatagcagaagggcaagtactttccagcctctgcttgcatcacatttgctactatctcattggctaaagcaagtcacaggtcacccagcttcaaggagctggagaaacagactccagctcttgacaagaggcactgcaaaaccccactgcaaagagcttggatattgggtggggaggactttctaccctagtgtctatcagggttgacacagtaagtcatgatccagaaataaaagaacacacagctctctattcagacatgtgggcttgtggacatgaagctggagaaacataaggtgataaagaaaatcctgatggaattggtaaaagagcctaaggcccacacaaatcagagtgttggctgagtgtggtggctcacgcctgtaatcccggcactctgggaggccgaggcaggtggatcacctgagatsgggagtttgagaccagcctggccaacatggtgaaaccctgtctctagtaaaaatacaaamattagctgggcrtggtgrcacgcatctgtaatcccagctacttgggaagctgaggcaggagaatcgcttgaacccaggaggtggaggttgcagtgagctgagatcatgccactgcactccagcctgggcaacagaggcagactctatctaaaaaaacaaaacaaacaaacaaaaaacaaaacagagtgttgctaagtgaggcagtaaaataagggttcacagttaactattcagagccaaagcaattgatttattttgataagcaataacttcctgcttcccattgattaatacatattattttttggtggttataggtgtctcatgattcaccaattaagttggtgggaggaacctgaaatacctgaataatgttgtgcttttgggttcatacctgacctatgaggattacaatggcaccgtcccctttttcccaaacaggtcaaagagattgtagcacagcacacaaaggaatggtcagaaatgatcaatacccacagtgctgaggagcaagaaatccgagacctgcacctcagccagcagtgtgagctgctgaaaaagctactcatcaatgcccacgagcagcaaacccagcagctgaaactgtcccatgacaggtgggggaattgccgtctccagagtaaacatctaatatttaaaaacaaaagctgattttgtgtgtataagagagccaaggtaataagtgaaatcaatttgacgtacaacatgtagctcttttgtgtatctcatcatatggctgattatgagcaagatgagctataagaaatggcacccaggggccaggtgcagtggctcacacctgtaatcccagtgctttgagaggccaagacaggaggattacttgagcccaggasttcaagacatagcaagaccccatctctattttgaaaaaagaaatggcccctgccatcagagggcttacaggtgttggcaagatacaacacccatatgaacagttaagtcagataacaaagtagcrtatgacacatattttaaaatgtcatgggcactaaaggcatccagctcagaggagctctaccttttcagagtggtcatggagacttttcaaaatggtagggctggaactggcctttggagaatgatctggagtctcttaggtagaaaagacacacagagagataaagaccaatcagttcagctcctagagtgaccaggttctgatcatttaatagctacctgtggagagagtctccatttcccttccttacagtgttaggacttctgtgaattttgaaaagatargcctgattaaaaaacagcaaagtatcagtttattttggcctgtgcccacttcagcaaagtgaatattgcatttgaaatactgcaagccatgagctggacttatccctgagcagaagaaggttggtgtttgttacatctttttatcatagctcggttgcagcttgcttggttctcacttagtgcctaccgtatgccacagttagggtctcttgagacacaacaagagtagaaaatagaagcattatacaaataaatcaaacaaaaaaatgtgtttaatgccaactgcataagttatctggctgcatgcccaaattcccaacattactttggagtgacagatactgccacaagaacaaagtgtttttgccctggtttcccattctcatttgaggcaactaaatgcagtctcccatgctccattttctgtgggataatgtgctgtacccccatgcattttaaagcattctatttcgtcctataggattagaagttgtcttttcttttttccttagaaatgctcttgattcactatgcagaaagttgtgttcatcattctgcctttgatgattgctacaatgccagattttaggtgcctacccttattcaaagatacttcacggaatacagcatggcacttgtctaatcttcttttacattgttgaataaagagaaaaacattagctcacaacagtaggcattatctgaaaggaaaaaacaaaatatactaattcttgaattgcttaggaagtcatttgaagagatcatgacctagttactaaaatactttaaaaaataaatccatgggcttcattccaagatggctgaataagaacaggtccagtctgcagctcctagcatgatcgatgcagaagatgggtgatttctgcatttccaactgaggtacctggttcatctcattggaactggttggacagtgggtgcagcccaagaagtgtgagccaaagcagggtggggtgtcacctcacccaggaagcacaaggggtcaggggacttccctttcctagccaaaggaagccgtgacagactgtctctggaaaaacaggacacttctgcccaaatactgtgcttttcccaaggtcttagcaaccggcagacaaggcgattctctcctgtgcctggcttggcaggttccacgcccatgtagccaggctcactgctagtgcagcagtcagatcgaaccgtgaggcagcaacctggctggggtaggagcgtccaccattkctgaggcttgagtaggtaaacaaagtggccaggaagctcaarttgggtggagcccactgcagctcagcaaggcctactgcctctatagacaccatctctgtgggcagggcatagctgaacaaaaggcagcagacaacttctgcagacttaaacatccctgtctgacagctctgaagagagcagtggttctcccagcatggcgtttgagctctgagaacrgacagactgcctcctcaagtgggtccctgacccccatgtagcctaactgggagacaccaccaagcaggggccgacagacacctcatataggtgggtgcccctctgggacaaagctgccacaggaaggatcaggcagcartatttgctgttctgsagcctccgctggtgatacccaggcaaacagggtctggagtggacctccagcaaactccaacagacctgcagctgagggacctgactagtagaaggaaaactaacaaacagaaaggaatagcatcatcatcaacaaaaagttcatctacaccaaaaccccatctgtaggtcaccaacatcaaagacaaaaggtagataaaascgcaaagatggggagaaaccagagcagaaatgttgaaaattctaaaaaccagagcacctcttctcctccaaaggatcgcagctccttgccagcaatggaacaaagctggatggagaaggactttgacaagttgacagaagtgggcttcaaaaggtcagtaataacaaacttctctgagctaaaggagcatgttcaaacccatcgcaaggaagctaaaaaccttgaaaaaaggctagatgaatggataactataataaacagtgtagagaagaccttaaatgacctgacggagctgaaaaccatggcacgagagcttcgtgacacatgcacaagcttcaatagctgattcgatcaagtggaagaaagggtatcagtgattgaagrtcaaattaatgaaataaagcaagaagaaaagattagagaagaaagagtaaaaagaaaggaacaaagcctccaagaaatatgggactatgtgaaaagaccaaatctgtgtttgattggtgtacccaaaagtgatggggagaatggaaccaagttggaaaacactctttaggatatcatccagtagaacttccccaacttagcaaggcatgccaacattcaaattcaagaaagacagagaacaccgcaaagatactcctcgagaagagcaaccctaagacacataattgtcagattcaccaaggttgaaatgatggaaaaaatgttaagggcagccagagagaaaggtcgggttacccacaaaggaaagtctatcagactaacagcggacctctcggcagaaaccctacaagccagaagaaagtaggggccaatattcaacattcttaaagaaaggattttcaacccagaatttcatatccagccaaactaagcttcataagtgaaggagaaataaaatcctttacaggcaagcaaatgctgaaagattttgtcaccgccaggcctgccttataagagytcctgaaggaagcattaaacatggaaagaaacaaccggtaccagccactgcaaaaacatgccaaattgtaaagaccaacgaggctaggaagaaactgcatcaattaatgggcaaaataaccagttaacatcataatgacaggatcaaattcacatataacaatattaaccttaaatgtaaataggctaaatgccccaattaaaagacacagactggmaaactggattaagagtcaagacccatcagtgtgctgaattcaggaaacccatctcacatgcagagacacacacaggctcaaaataaagggatggaggaagatctaccaagcaaatggaaagcaaaaaaaaaaaaaaaaaaaaagcaggggttgcaatcctagtctctaataaaacagactttaaaccaacaaagatcaaaagagacaaagaaggccattacataatggtaaagggatcaattcaacaagaagagttaactatcctaaatatatatgcacccaatacaggagcatgcagattcataaagcaagtccttagagacctacaaagagacttagactcccacataataataatgggagactttaacaccccactgtcratattagacagatcaatgagacagaaggttaatargatatccaggacttgaactcggctcttcaccaagcagacctaatagacatctacaggactctccaccccaaatcaacagaatatacattcttctcagcaccacatcacacttattctaaaattgacaacataattggaagtaaagcactcctcagcaaatgtaaaggaacagaaatcacaacaaactatctctcaggccacagtgcaatcaaattagaactcaggattaagaaactcactcaaaactgcaaaactacatggaaacagaacaacctgctcctgaatgactactgggtaaataatggaatgaaggcagaaataaagatgttctttgaaaccaatgagaacaaagacacaacataccagaatctctgggacacatttaaagcagtgtgtagagggaaatttatagcactaaatgcccacaagagaaagcaggaaagatataaaattgacaccctaacgtcacaattaaaagaactagagacgcaagagcaaacaaattccaaagctagcagaaggcaagaaataactaagatcagagcagaactgaaagagatagcgacacaaaaaacccttcaaaaaaatcaatgaatccgggagctggttttttgaaaagatcaacaaaattgatagacygctagcaagactaataaagaagaaaagagagaagaataaaaaagatgcaataaaaaaatgataaaagagatatcaccaccgatcccacagaaatacaaactaccatcagagaatactataaacacctctatgcaaataaactagaaaatctagaagaaatggataaattcctggacacatacaccctcccgagactaaacctggaagaagttgaatctctgaatagaccaataacaggctctaaagttgaggcaataattaatagcctaccaatcaaaaaaagtccaggaccagacagattcacagccgaattctaccagagatacaaagaggagctgataccattccttctgaaactattccaatcaacagaaaaagagggaatcctccctaactcattctatgaggccagcatcatcctgataccaaagcctggcagaggcacaacaaaaaaagagaattttagaccartatccctgatgaacatccatgcaaaaatcctcaataagataaatactggcaaaccaaatccagcagcacatcagaaagcttaaccaccatgatcatgtcggcttcatccctgggatgcaagtctggttcaacatatgcaaatcaataaatgtaatccatcacgtaaacagaaccaataacaaaaaccacatgattatctcaatagatgcagaaaaggccaacaaaattcaacaggccttcatgctaaaaactctcaataaactagatattgatggaatgtatctcaaattaataagagctatttatgacaaacccacagccaatgtcatactgaatgggcaaaaactggaagcattccctctgaaaactggcacaagacaaggatgccctctgtcaccactcctattcaacatagtgttggaagttctggccagggcaatcaggcaagagaaagaaataaagggtattcatttaggaaaagaggaagtcaaattgtccctgtttgcacatcacatgatagtatatttagaaaaccccttcatctcagccccaaatctcctcaagctgataagcaacttcagcaaagtctcaggatacaaaatcaatgtgcaaaaatcacaagcgttcctatacaccaatgacagacaaccagagagccaaatcatgagtgagcttccatttgcatttgctacaaagagaataaaatacctaggaatccaacttacaagagatgtgagggacctcttcaaggagagctacaaaccactgctcaatgaaataaaagaggacagaaatgaatggaagaacattccatgctcatggataggaagmatcagtatcgtgaaaatgcccatactgcccaaggtaatttatagattcaatgccatccccatcaagctaccaatgackttcttcacagaattggaaaaaactattttaaagttcatatggaaccaaaaaagagccctcattgccaagacaatcctaagcaaaaagaacaaagctggaggcatcatgctacccaactttaaactatactacaaggctacagtaaccaaaccagcatggtactagtacgaaaacagagatatagaccaatggaacagaacagagcccttagaaataacaccacacatctacaaccatctgatctttgacaaacctgacaaaaacaaaaaatggggagaggattccctatttaataaatggtgctgggaaaactgtctaaccatatgtagaaagctgaaactggatcycttccttacaccttatacaaaaattaattcaagatggattaaagacttaaatgtcagacctaaaaccataaaagccctagaagaaaacctaggcaataccattcaggacataggcatgggcaaggacttcatgactaaaacaaaaagcaatggccaccaaagccaaaacagacaaatgggatctaattaaactaaagagcttctgcatggcaaaagaaactaccattagagtgaacaggcaactcacagaatgggagaaaatttttgcagtctacccatctgacaaagggctaatatccagaatctacaaagaactcaaacaaatttacaagaaaaaaacaaccccatcaaaaagtaggcaaaggatatgaacagacacttctcaaaaggagacatttatgcagccaacagacacatgaaaaaatgctcatcatcactggtcatcagagaaatgcaaatcaaaaccacaagagttgccatctcacgccagttagaatggcgatcattaaaaagtcaggaaacaacagatrctggagaggacgtggagaaataggaacgcttttacactgttggtgggagtgtaaatttgttcaacgattgtggaagacagtgtggcgattcctcaaggatctagaactagaaatcccatttgacccagcaatcccattactgggtatatacccagagaattataaaccatgctactataaagacacatgcacacatgtgtttattgtggcactattgacaatagcaaagacttggaaccaacccaaatgtccatcagtgatagactggattaaaaaaatgtggcacatatacaacatggaatactatgcagccataaaaaaggatgagttcatgtcctttgcagagacatggatgaagctggaaaccatcattctcagcaaactatcacaaggacagaaaaccaaacaccgtatgttcttactcataggtgggaattgaacagtgagaacacttggacacagkgtagggaacgtcacacaccgggccttttggagggtgggggactgggggagggatagcattaggagaaatgtctaatgtaaatgacragttgatgggtgcagcaaaccaacatggcacatgtatacctatgtatcaatcctgcacgttgtgcacatgcaccctagaacttaaagtataataaaaaataaataaataaataaaataaatccatggcagaagcacttttcaaagcaacagcagtattttagctttttctcaaacccctggtggttgtgtttcttcctcatgatcacaactattattcttggttaaaaatctttgctttcttgacatttgtcagcaacgtttggtcattggtgtttgttgaatgaatgaatacagaaaggtcaatttcctaacaagttatggtaaaatctgagagtgatcttcttgtgtccagagtttctatacatgttcctgctggagtggctctagggtagctgagtgagcaactctccagttcagtattgcccatctctttggatgcagagcaaatagcagtgcctaggtaacctgactgcttgtatgctggtttccaggcagtgctttcaatagatctccataggttatagaaaaaaatttttgtaataatatactatgtagcattttaagttttattcctttaatgcatgtgtgtcatgcatacacatgcattcccacatgcagtggttggtcacctgcaaacctacttttttgctattccctgtgcttacttgaaaccatttagtccctttcattcctgtggctgatagaaacaggaaggccgtttgtgatggttagaacattttctctctctcttccagcccatctgatcccaaataatatgaagcaaaactgagatctttatatttatgggcaaaaatactgtctcctcatcacaggccatcactgtcacttcaccactaggtggccactgcccctcaaggatcagcatccacatagcttggggtcccgtccctcctttttccaaaatacagaagtcgatgagctcaataatagaaagaaaaaaaaagaagagtgagaggagtgagcctagtcatattgctataaacagaagtatttttgtttttttccatgcttaaattatgtctatatatataaaatgtaaactttactgttgtaaccattaagtgcatgacattaagtacattcactttgttgtgtacccgtcactgccacccacctctagaactttctcattttccccaggtgaatctctctacccattaaacacaaactctccatcccccctccctgtttgttttcttgtttttaatacatagggaaagcaaggaaatgcgagcacaccaggctaagatttctatggaaaatagcaaagccatcagccaagataaatctatcaagaataaagcagaacgggaaaggtaagtctgagagtgttcactgcaggaatatggcattgacttgaggacacagtctcaactttctttatgtgtgtacacacacacacaactgagacagcaaaacacttgtggcttttgactaggaattctgctattataactgcaatggagatttgttattatcactgtagaacaatcgtccacattttctggttgcttactaccaccagtaaaattagtttacattcaatatatatgtgctgctttacaaacaaagttgcataaaatatgacataataatataattcttttttttattttattcatttttttttttgcttgtttgttttgagatggagtcttgctttattacccatgctagagtgcagtggcacaatctcagctcactgcaacctctgcctgggtttgagcgattctcctgcctgagcctccctagtagctgggattacaggcatgcaccaccacacctggctaatttttgtatttttaggagagatggggtttcaccatgttggccacactggtcttgaactcctgacctcaagtgatctgcccgcctcagcctcccaaagtgctgggattataggcgtgagccactgcgcccagcctataatcaatataattctgaagcatccttcccaggttccactgggtcattctgcaagcctctcccctgctcaggtgtcagtccgttctggatgggccagttctgaatagcagcaacagtcaggagggcggtcttcttcagtagtccttcacatgggatcatcttgaaagcccccatcccatttgtctcatttgtccttatgttaggtgagttttctggaagcagatcaaggcaggaattgatgtgcttgtgattcactgaggaagggaccttcagagaaagggagtgagaaagcaggaaggcccagggcaggccctaagcaaggatgtggtctcacctagggtcccagtaacctcaaataaaaaattccaccacagatttgtccctctttgaagcaagagtacctggcttttgtgtttccatattaggcagtcattggcygcctgagactggggggaaggtttgtgtgtcctctatagaaggtgccaagtgcaagccctttagacacagctggtgaaggggatctgaggagctgtcaatagtcatgttacccaagggataggcacttaattcccagcgatcaccagtgctgcccatcatccacctcaaggaacatctgagaatacaaatgctatcagctccataaccaagagcctggattacgccaccagcagttagggacagtggggttccttcttttgggggaataatacctagcaagaaggtggccttttggccaaagtccaacagagaaaagctgttttatgagccaggtgcagtggctcacacctgtaawcccagcactttgggaggccgaggtgggcagattacctgaggtcaggagtttgggaccagcttgaccaacatggtgaaacctcacctctactaaaaatacaaaaaaattagctgggtgtggtggtacctgcctgtaatcccagctactcaggaggctgaggcaggagaattgcttgaaccccaggggcggaggttgcagtgagccgagatcctgccattgcactccagcctggccaacagagcaaaactccatctcaaaaaaaaaaagaaaagaaaaaatgtcattctctggatgttattctcagataagyaactttgtttaagggccttatatacatggaaatgacaccttcttcagtttgaaaacaccaaatattccagccatgataaaacctcatgaatttgaactgttttagactatccaaagtgaaatatagaattaaccatgacaaatgtgccaattaatagctttttaccatctttttcaaatatgttacaaagtagactttagctcggttgaggtcaaattatcttcaatttggagttactgctaacttaattagcaagggtcttaaaaatttatcttattttgaaaactgtacttayttgttgtaactttctatttttatttgtgcaactgtatgggggtacgtgagaaaactttacatgtatacaatgcccagtgatcaagtcagggcatttaggttgtccatcacccaagtactatacatttgtggctaagtatwgtcaccctactctgctatctcttataagtttgtayccagtggtatgtggttccaaaatatctacaaattggctgttttttaaaaaataatttttctataccaaatgatagttatattctaaacccatactgtgtgtatgtttgtatccactttatcaaactgaggagaaataaaatttaaaaatttgtcatagcactaagaaagatacatagaaactgaaaatcatacttacatttttagatcaaagaagacaytttaacagaaattacccaatatttataactgaatgacaatgtaaacactatttatcaatgtgtagagggtagttaaagtgatatttggagggaaaaatatagcctagatgcatatattttttaaaagatgtgaaaattaatgagctaaccactcaaagagaatatgaagttggaaaaacagagtgaacccaaagatctctgatggaaagaaataaatttaaaaagcaaaaaatactgaaatagaaaacaaaatgcaatagagaacattcagaaaaacaaaagcttatttgaaaagaataataaatcagttaactttcaccaagactaaagaagagagagaaagcacgaattagtgatgttaggaatgaaaaggggaattaactacagagaaaaacgctttgaaaaactaagtctactattaaaaaaaactaccaataaatttgaaacgttagatggagtggagaattgctttgaaaaatataaatatccaaaactgactgaaaatggagaaaacctgaacagactggcaattattacagaagttcaagaagttataggtcttttcactcatgaaaaacactctacctcaccagtagtcagggaaatgcaagttaagacaataagctccattccataggagcatccaactgacagaaagtctgatagtactaagagtgggcaaagatatggggaaagggtaacacccagacactgcagatggaaatgcagttggggacaactggattggagtaaggaagagcctgttcgtaccctgccaagtgacaagtctgagtatacaccctacagcagcctttgcctgtgtgcacaagaagatatgcaccatacttcatccactcatctgyttattcaacagacacttattgtgtcaggtattacagggcccacgcacccgatcgttgtagcgttgtttgaaaataacctaatttttgttaatggcaatgaggaaatagtgtagtctgttcataaattgaaaagtccatacagcaaatgaaaataatgaagtggtctggaacataggtgtatctctaaaacataagactaagtggtaagctatgggaagaaacccagactatgttactctatgggtacatttagaaaacacaggaagcgatgccactgtgcctggccagcaacatcagcatcacctgggagcttactagaaattcagacctcccaccccaggcccactggatcaaagtcactaaggggaaggcacaacagtctgtggtttttatcatctctccaggtgattggtatgcacaggaaagtttgagaagctcttatattacacatgggcacatctgtatgtggtttaaaatattaaaacatgggtgagaagatccacaccaaattcacaatagtggtaacctctggggagagaggaataaggaaaactgaatcaggaagaatacacatggggctttaattacatctggaactgtttattgcctttaaaaatgtgagataaacatggcaaaacattaaaaatatcagttaatctgagggacacatacacagatttttaaatattcttctctggacattatatgtttgaaaatactgcaataacaattagaaaaataaagcaataattccatccagagaatttgatggaatatagctctttattatttgatataatattaatttcattcaatgtcataccaaccgttatttgtgcccattgcttttaggcgagtcagggagttaaacagcagcaacactaaaaagtttctggaagaaagaaagagagtaagtattttattatatttttggcattcttcctttaaaaaactataaacaataacatgcttagccaccagayctctagctaatttgtttaatttgatttttctgtacattaaacattccagcttctctgctccctgaaagctaaaataatgtctcactaaaatctttaaggtaatgatttggcaccattttatacagaaaatgaagccaggtttagtcatgcgtaagtcctctattattttckaagattttagcaggaaagatcttcccagaaataattatgagtttaaactctccaaattttgagatgattttttaaaaaattattatctctttcacttaaattataaagttacaagtcatctctcatccctgttttaagattgtaacccaaagttcaatcaraattttttttttttttttttttgcagcttgccatgaagcagtccaaagaaatggatcagttgaaaaaagtccagcttgaacatctagaattcctagagaaacagaatgagcaggtattttacctaaaatacgtaaaaacatgcaggcagctagccagctttgggatacacatgccatggcccacagtgaccagtggcttgcatattgtaattgaaaggtagatagaagaatttgttgcccattactatattttctccattatatccaaaaagaaaagaaagtaccagtttttggagcaggagcagaatctggctgtgccaaaaaaagaatatttggataaattatggggattatgtgaattctaagaatgaaattactaaaagtgagaggatgaaaaaaagagattacgaagtatttctccattttcatttagagttttataatttgcaaactataggcaagggatatgatgtttaaaagcaaatgagagaaaccacctattttcaaactcaatctgaaaacgaagtttaaaaacctccctgggacttacaggtggtatctaaagtcatgagcccccatcactctacaaatcactgagcatgagtggataccatagtcttggtctttttccctgcaagacaagacactaaataaagaaatatacacaaataaagagttatccaggccgggcgcagtgggctcatgcctgtwatcccagcactttgagaggccgaggagggtggatcaggaggtcaggagatcgagaccatcctggccaacatggtgaagccccgtctctactaaaaatacaaaaattagccgggcctggtggcatgcacctgtagtcccagctactcagttggctgaagcaggaaaatcacttgaacccaagaggcggaggttgcagtgagccgagatcgcaccactgcactccagcctgagcgacagagtgactccatctcaaaaaaaaaaaaaaaggagttacccaaacaccaactgtttagttaggccaatgggcatataccagcaccaaggtaaatgtatttttatctggtgcatagtacaggtgggcacctttccaaatgggctacagcccatcagccttctacagtaacctttaattaatggaaatccctctagttcctatggcaacaagaccctcagttatcatttacatttcagactctctcagttcaaatgttattctttaggtgtagttggtatagaagttattattcctaggtaattcaatttagaaacggagaggttttgatgaaatatgtacttgtgccacattattccttcctgttttctcccatctataaaacaatcctatttaaggaatacttttttccagagtaaatgactccccttgaagaatacttaagtaggaattatactaaaaagtacctttgagaaagtaaaaataaaataaaataaaataaaataaaatcttttttgtatggcaattgggtaacagataaatctgacttctagtttcagattctttactttttggtggacagaaattttattcatcaacatacttcctagttatgtttcccatttccttttcagctaagtgcttctattcataagcaagtccactccaaggggacaatacatggttattgtcccacaggtacaattcatttgaccaactcataaacacatcacattctggtacaagttacctagcttatgtttttgctcttaaagcacttctcagaaagtgctcctgggggaaatatgggaatatgagtaaggataaagtcaccatctccaaagctttagaagccacttcagtgattcaacaatgggtagggataaggatgccttggagaaggtttttaaaaattctccctagaggaagggcacagtgaaaggtaaggcacagttatgtgttagttaactaaattaagaaactacttggaaattaattgtgttgcttagcaacaagtttgactaaagaatgtaaatgtgctcagaattactcatcactacaatagtggtgtatgccagagctagagaaaacagtcatcttgtgtcgctagctttggagccgaagtacataatttttaaaaatcagtttgagcttttatcctaacacatggctaattcaagccacaccagagttcttgcattaaactgctagattagtgatagctgtattgattagattgtattgggagggtgctggctttttgttgcagaaattcaaatatgtcttttaaggtctaccacccacaactgacactttgagtcacaaaagcttgggaaagcatagaacatgaaaaggcttgagacctgataaagatttaatgagattcaaggaaaagacattcaagatatcatactgatgcttctggcaagcaaagaatttggacttgagtttctgtgttaagctttgctttagaaatatggcctgttcaattgcaaattcaatcccagatctttctagtatacattttttggcatttaagggtgagaaagctctcaattcacagttactctgtatggtacaacactgtcatgggcacagtgcaaaagatacagtgacttcatttctttcctcataaaaaggcaaggtctggaactatatagtataactgccttcataaccaggtaaacatttcatcagcaagaacagttctttgtctccagacaatgcaaacttctacaacaatcttctaaataattgttaaatcccaagacattttttctaagccagagataaatgtaaacattctcccatagtatttccctcaaaggtttctttctgttctcctgtgaccctactcctaatcsgtgtcccaaatctccccttccaaagcaaggcctggaatggattcagtccattagctaaaccagtgttgggggcactggcagaaacaaaccaggcgtcagtatgttttggtcctgattctggatcctcaccttctaggttatttgtaagccactttatgtccttgcctacttggtcagccaactattcacttaacactctgaaggttggggatgtttttcctacttgagttttttcatagacttcccagctacacagtatatctcatctgtcttgacatgtaccatttcaaacattaacgactccattactgtcacacactcgagtctcaaaaattgatttttatcatcaatcctatcatttaataaagagaggtaaaaggttttgcttaaaggccaggttctccacttactgccacagaagagaggcacagtctgggaatgacaggcgttggttgtttgtttygtttcttttttttctgttgagatcaactaggggaaagtttgtcactgaggggtgtgtacatgttttatccttagctttttgcttttctgtatatggttttgcattcatttttcaaattcacttcaatattcatttattttcttcgttttgtatgtatgactcaattttgacattactatttttgtacaaacagcttttgaaatcctgtcatgcagtgtcccaaacgcaaggtaggaccgaaactctgataagcaagacgttgctttccttctcgactacgtccgtattctctgtgcagtctccatttatgagtcacatctggtcataactaatatctgaagggtttggatttaaaagcttgactattccatgcttggatttctgatgtcatattcatgccaaaatgccctaagtctttagagaattacttctgagggtatttgaacctgtattttctattgcagatttaggaaacagatcatggtaataaagacataaccagaacagtgatgtgcagctgtcatttggactgaccagagctaagacagggtcacagagtcaggtcactcacaaatgttaatatgactccaattaatttttaaagcgctcgctgaaagttggttggtggtttttaatgatggagctgtgctgtgcatgtagaaaccttacacgatgactcttgtcatgctctctgctaagtcccatctgccaaagaccctaatcactcctcataagtaaggtggtcatataatttattgtccataccaggatagttttgagagtgaaaggcagctctgtttataatatctaggactacaggcataaactggaattgcctcagacaaatgagaatgaatggtcacccaactcatataagaacttagctgttggaatagtcttgtaatgtcctatgattcttccttctacaccgtggtcaatactttcttcagaagctaaagggggacaagcacagagaatcatttgctactatttaccgaacttggaagtatttaatttccagtgctgataatgtttcactgtcatcccttttgaatactgtttgtgtcatagtttcatgtttgtatatttttctccatttcttcatttctctattagagtattactatactttaggcataaaaaatatctgggcagagggaaccaaccatcccaaatttacacagaaagatttaattctttggtgttattatatccatcctcaccaaaatgaagcttaacgccaaaatatagaagtaagaagaagaaggaaatcacagtatagtctgtgggttaaattaattttgtcacaagaattcatttggaagatgcttctcatatatctacagagttgaccaaatcccctcccagtgaccttccatttagttggaatatctaagcagacataaatagtaacatcagggcacttcagaatcttcatccgatttatatcttcataggtccatgtttctattttcaaatgtcctttatttcaaagcagcatgtcactaaaaaaaagaaatgggcaatcatcattcctcaaaagatacgtgcatttggttgggcaaaatcatccaggctaccagttggataataaaagtcgaaatgtactatttgattttttcctatgtttccaagcaagtatttctcaccagacactgcccccatcatatcccctttcctcttctcgaattagctggttttcttagtgacaatctgaactcatgaggttgaattcaccattgcttacttcctggtagtccataaaaagtaccctagagaagtaagagcccacagggatagagtttgcacaataagattcctgaaagcctgcatgttcctgtaacattccatttacagaagactccagccaatccaatgtaatatgctctcacctgaacttctctatcaattagatttttagggaattacttttaactaaatttcaggctatttaggaaataagttgtacataagcaatacttattctaatgtgataaaattatctacacacagtcaaagcaacgtgtcaatctgtagaaactaaatcaaacagtttgtggtatrgtctaaagataaagcaagtggtctaccctcttctcaagtggttctcctggcactgtgtaaaccagtccccaaaatttaatgtgtataaaaacttcctggagatcttgttaaaatgaagattttaactgattcaatagatctggggtagactccaagattctacgtttctaagaaggtcccaggcaatgctgatgctgcttgtacatggaccatattttgagtagcaaggatgtggtgacaggatcatatttatgggagaagagaggccagggttgttaagtgccttcagataaggatttcaacacacgtaaggccatgtttctgatgttataggcgaaggagatgcagcagatggtgaaattggaagccgagatggaccgcagaccagcaacagtagtatgaaactccaaaatgcaaactgaagcagcaaacccacaaagcatcaaaagactcactcacaaacttctgaacacaaactccatggatgaaagctgtttattttgtttcctttatgtgtaaacaagatgatatctgaaaccagagagacttggaatgtctgactgacttctatttaacagcttgagtattgcatttccttggccaaacaaaaatagctacaaatccacaaaaatttactattccagtaaggcagagtccaaccattgataatacaacttaaacatgtttgctatraaataccatcacaagtaaatgagcttggtgtgaacaactctcctttgtgatgccttaggacatgtttgaactgcagcaaaaaacaaaaacaaaaaacagtgcattagcaatttcatagcaagtgcatgcactaggaaaagaaaactctgtctacaagtttattagcagaagtggtggtctgctagacaaataattttgcaaaatttttctacatctaagttacctcatcagtaagtgccatgtctctaccatgccatcagaggctaatttcctgtaaaagttgtggaaattgttagaacaatagaaaaatagagcagtgtatgtgtgccaaaactcatcattactcaaaggagaactgtgttaggcacatttaagaaagtttacatctgacattgctttataggaattgtttctgcagattccggatattataattcacaccataaagattgtgaagtggttattggcaaacgtttgtaaatgtgaccatgtataaagtatttatactctttaattcacactgttagagagcaaaatcatctaagtattgccacatgacaagattagtaaacaggaatactagaactatgtttgcatgatacacaagcaccaataaagactaatccatacacagttaacctaatgccaaataaatactggttaaataaatgtatggcacagaatataatttgactatcaagacttttagcataatgaaaaaccctctctctatatatatatgtgtatatgaattatgtgggcattcttgatacttcaagttctagtttgaaaaaaatacataactaatttaattttacacaaaaatatttatgcagattttcagaatttcatatcaggaaatgacctttttatgtctgttaaatatcaaaacaatttgctacagtgttaatctgcatggtctttaagcctgctgtagttgagttgcagacagtgcatgaaaaagtattccgctgggaattgagccatgccaccaaagccaagaggagcgcatggaaacccggtagtctagaactaatcagattactgattttagggcacagcaccagatgaattgttgtatatgcttgtaaaaattgattctgtgtgttcctctgaacaaagcggagaaaatgatgataccatcaatattgaaattaaacttccaacttctctaataaaaaattaaaacacgcataacactcgtcaagagtatttgctcccaagacacattctagcaaatgttttgcctttttcatatacatgatatcatcgttattttcaaagggggcttattaataccctcagcatgtttttcacccaaatgatgcaaaacatgcagattctagttgacttcagttgtaatagacttgtttttctcctatttatgatttgaagtggattctgtaaaatatctcttgttcttagtttccttatctgtaaaacagtggagttagactacatatcttttggcactaacatctcatgaaaaattatggttaataaaatatcaccacatttggattgccaattttcaaagattctgagtggcttctcatcatcaaatcaaatcaaatccaagagctcaactatgctcaccattctgtaacacttgactgaattcatcacttgcctcctcttgtttctgctttggagaggtactactagtttttccatttttcttatttcttccctcttttcatcctcctaggccaccataagcatttatattttccagtgttatacatggaaccagtttgtttttctttgatccaggttacttttagtatttgagacatcataccattaatccattgtagtaggattaaaatgtacacacaactcaaatgtgcaacaaaagcatgtgttacctgctattgtcagttcatattgcactcaaaccttgcattatcccttattatgaagaaaaattaatagccaattaaagtaactcagtgtcttccagttttgtttttttttttttaaaaaaaaaaaaacattttcagggacatgtttagttacttgagagtcaaatcccctgttagagatccctccccattcaggagatcttgcttttttccccagatggcatctgggtatgagggaagctcaygtgtccacctggcaattggtaggagcatctggtttccccattgttggacaggtcctaactgcactctactgcagctttgcaaagtgggccttcccaccccagtggttcaaagtccctgctcagccaagtcctcattctggtatcagtttattccagcattcttctgggatatgcagaacttccaggtctttgggggctgtgcaggaaccaaagatgctgtctcaggtccatccatcaaaacactcctttggtcatttgtcagctactagggccatgtagtttcaataccacagagttttctaaatccaggaggcttgaaatgttccagagcaatgccccaaaaagcaagaagcaagcaagctttatactgccccaagactatctgggtttctacaacatcttgcttctcccaccatcagaactttttgttcttatttgggagccagggcacttgagtctcaattcttacctttattctttctttcagcccagaaaagatactcaactcccattcctgactgatggaatacccatacagtactatacttctcttttcctaagtaggttgctcttcacattttgggggaataaaaggcttcatggaaaaagagccaggttaccaagatagggaaacacatcagaaagtaccatctttcatcaaattgaaggcattattgattatagcttatactattattttatataccacacaaaatgaaacacactgccaattaaactataataccctatccggtgattgtcaaggcacatcccaatttcagagatgttaaaatgtgaaaaatacatacatcttggaatccatgaaatatgtagtattccaaaagtagtatacaaactcctcaaccctaagccttaaagaggagaggaaattttaaagataggacacaagagaatcattttatcacaaaactgaaactggttttgtggaactgaaaaatggttccaaaaaggaaccattctgcaactgagtttcaaatttagcaatgagcttcctggaaagcaattcaaaaaggggaagaaatctatctttcaccgtctttatttgaagaatcttgtttcctttagctgtttctttcaatcacatgcctttgatttctacttctttgcatgtaattctcgaatctataattctagcctttacctttctttcccgaagctctgactctccctctcagattgtcaatagttaaataggcggccatgtgcacattgtatgtgattaattaaaaaaaatagagactctttctccatctgtcctccccacatattttaatagtccataagcagtgctaaaccttgtggccatctttttctgctccatctcatttcctccagcacccaatctgttcataaaacttatgaattctgtcctgtcttggaaactttcttctccttccttataactcaacgttcagaattttaaacttgctgttcaatttctttgccctccaaatcccttttacacagagattaatcttcccaaatgacacctgcaatcatattaccattctgcttgtaaatgcagaattcctgtctactgcctaaagaataatgttgaaattagtgataacagcattcattttctgcccccaacatgcctactcattttagtcaatatgaatttatcactagtctctgttcacatacacatagtacacatcttttctagccacattacataataatgttctattaagtcttgaaaagcaacttccaaaaatgccatttctgaaaagttctctcattctcccaagcaagaagtaacctgccctttttcatttatccatttatactttaaaagctatttaagcataagacttttccaccagtcctgactaatttcttttcaggctttgttcagttgctcttcaaagaagaggtagtcactagatatcgaattactaagttattttctatgaagtaaaataaccatctgtatagactcttgggcaggaaatgcctttgaaaacttaatgaaaacctaaaagaagcttttttgcaaagtgtcttttcagttccaagaaaaataatttttctcaatacttattgttagcatacttttaaaacagtgcaatgatcacagtggccatcacggatctaacagtgtggatccatcaacattaagagattatggagagtgaagaaggaatacccctattattttattgctgaggttatcttagggacgcctcgttcaaaactctagcttctccttcttcatcacttgtgcaaatctaacagaaggccacacatttctacaactcttctttgatgcttgacgttgaacggaatctcaagcacatattttaattgcatctttaatatcataataaatctggtgatacctctgggatgaatatttatgagccatcttctttaataatattttgtggaaaacgttctgctccataggttagaataatgaaaaaatattaggcgggtggggggagtagggagatggttaaaatagcagcatcattgcttttacattaaaaaattggtgtctacactgtacttatcgtgataaatgatgctgtgccttttccactcctttcctctcctagcattaccttcttggaagttcagggtaaggggcaatttctgaagtacttcatcctggaaatttttgagtgtccagcacaataaaattaggaaaaatttccaaggaaggccaatttaatattgtatacctaatcacttgcatcaggactcaatagctttagatgaatcagaatgtaccaaaaacaaaacagacagaaaaaggatttgaccatctgtcatttcggaactttgatatcatataatgtgaatgaggaaatgttatactgatccatcaaaattgtttacccttttcaagcaattcatggattttctcaaaattcacatgcagcttttaacacttctatcttttgtttttccttagacaaatcttggtattttgttagggtgtggtatttgttacagcacagcatattgaaccctacagactgtacccctgtattatgaattcacttctactacatcaagtagccatataaatggttatattagacatttcttcagcattgaactaactttatttgttcatggattaaatatttattggaaaaccactcttaacctctctacccttgtaacccagttccaactcattctgctcaccacacaacagccagtaagtagagagacaaggagttggaacaaggaaggtgactttagttcaaagagccagaaaactgagaagatggtggactagcgtcctaaagtaccatctttggtcagtactcatttcagactctttatgttaagggtggtgggaagaggaggagttgggatcaagaggtgactgacaactgcagacatttgagtgccaacaagggtctgaggaggttggaaacttctttgtctttgtctttagccaagtcacaatgttcctataaatctttaacaaaacatagttgcttacatactctctctttaatcccagagtacaaatacaaaatggctatttttgtattttatctgtgtgcccaaattagcctagcctatgtgcaggaacaggaaaaggccccttaaacaaaaatggggtcagttatgttcttttagtgtttcactgttacacacttccaactttttctcttttcttttttttttttttgagacagagtgactctgtcgcccaggctggagtgcagtggcactgtgtcggctcactgcaacctccgtctcctgggttcaagtgatcctcctgcctcaacctcctgagtagctaggattacaggcacgcaccaccatgcctggctaatttttgtatttttagtggagatggggtttcaccatgttgaccaggctggtctcaaactcctgacctcaggcaatctgcctgcctcggcctcccaaagtactgggattacaggcatgagccaccgtatccagcccttcaacttgtttttttaccagtaatgcactctattttgaaaacttatcaacagttttagctttaggcgatattcataaggtagatgggtggcattaatggccccaattttttatgcacaaaattatttagaacagtgtataaaattaccctgaggctatgtgtatacagtgtaatgacacataaatatattttgtgtttggacttggatcccatccccaagatatcttattatgtatatgcagatattccaaaatctaaaaacaaccgaaatctgaaacacttctggtcccaagcattttggataaggaacactcaagctgtagcagcaaactggacacgagtggaggcacatttttgtttcttcactttaagtctctgacactgccgtgagagcacatgagaaggctggcctgctggcgggtatgcgcgacttgcagagagtggagttatctcgttcattttaccagctgacaatagatgtgtgagcctgcagctgagatcagccatgcctttcccagagccgtgggaacacccagccaacctataaccatatgagaaataggaaatggatgttgatttgagccactgagttttgatattttttgttatgtggccataactaactgatacagccaagctctgggaacaggaagatgataaaacagtctcatttcaaagtcccagagactgcagctttcaaaagccactggaatcacctacaggcacggaacatggttttctcagggagtgattccagctgctaagcctcatgtttgatgtctcaggtttctttttatttgtaaccttctgagtgtctgctgttcacttcctctaagctggactgctgatgatttcaactaactttgtcatttgacaaacacctcctcctcctcatcctcctccccctccttcttcttcctcctcctcctactccttcttcttctttcttctttgactttctccctccccctccctgtcttttcatttttttggtttgcttctaaaccttctctctttttcctttgggctccctggtcactcaaatgacctcctgccacagtcttggatgctaatattaagtagctgctttcggactggtctgtttgagttatgggtcctaaaattgcagataaacggggaattactttaccacattactttgtccaattgcataaaatatgggacacagattttttaaatgcaatagtctagcaatggaaatatatggtattgagtagttagactgattttaaagcaaaattcttaaaagaaaaatataggagcatatattaggtattaataagaggaatgtatttaaatatatttcgaataatttaaaagtatattatgctaaataatatatgctgaaataaaattcagcaaagtaaaaatattttctaaggcttggaagtctattaagctaaacgtctgccaatcttatgtcccagcaattacactctaagagtaatgagtgtaagccagacatggtgatacacacctgcagtccaagctacttgggaggctgacaatataattcaaggctatgcctcctctttaatcccagagtacaaagtagtgttctatgatcgcacccaagaatagctaccacaccccagcgtgcaatacgtaacgagaccccatcttaaaaaagaagaagaaaaaagaaaaaaagaaatgagtgtattgtgtatgtgttcatcaaaaagcatgttctttattcataataataaaaagctagaaacaaatcagatgtgtaccaataggaggatgcattgatgaaatgtagtatattc

SEQ ID NO: 95892 - DNA, 17821 bp, Homo sapiens
  misc_feature (1)...(17821): n = A,T,C or G
cataactgaaacatacacatggtacaggtgctttgtgagctctttgtgacattcatcgtgtgtacaaagaaagatgtacagtaaacttgtccaacccacggcccaggacggctttgaatgcagcccaacacgaatccgtaaaacttttgtaaaatacacgagcttttttttcctttttttttttttttttagctcatcgactaccattagtgttagtgtattttatgtgtggcccaagacaattcttcttccaatatgggcccagggaagctgaaagattggacaccctgatataaagatatgtacacagcaatgttgctgataatggcccaaactagaaaccacactatcatcaatttaagaaaggctcaggccgggctcggtggctcatgcttgtaattccagcactttgggaggccgaggcgggtggctcacctgaggtcaggagtttgagaccagcctggccaacatggtgaaaccctgtctctactaaaaatacaaaaaattatctgggcgtgaggcaagagaatcacttgaacccaggaggcggagcttgcagtgagccgattttgtgccattgcactccagcctgagtgacagagtaagactctgtctcaaaaaaaaaggcccaataaatttagtaaattcatattacggaataaaacaatgaggctgctcattctctaagatatggtgtcttagatctctaagacatctgagatacagtgttgagtgaagaaggtaaattataaaacagtaagtatatagagtatgaaaccatttattccgacgcacacactcatacaccaaaaacaatactatatattctgtgtgtgtgtgtgtgtgtgtgtgtaagaaaagggttttaaagcggacaactaactgattctgaggttagggcaaaaagattggggctgtgagttggtatggtaagaaaaaaatatattttaaaaaatatatatttttaaaagagggttatctaattaaaagtactaaagcaaaattctatattaaaactaatggaaaaaaagaagtgttgccttttaggggctctttctggtaactgatatcacctctctcattctctgccatctctcatctcctggtctctcttgcttatcaagagaagactatgtcacttggatcccagcttttccctgcctcagctgaggccactatcctcgttgactcccatggtgacatggatgcctcatcaatattgtgggtttgagtcctcatctgcagggtccttgagatctccttggcatccactcccatttcctatctgggacttcattatcaccagcatctactccacctccaaaaccactggtggaagcagcgtcctctcttcccatgttacttgctcaacaactcccacaagtactactctttgaatattttgggggggtctttgattctttcctcagctgcctgttgattagatctcttctgtcttcacttgcctcctgatcccattttgccaacactctcaactcccttgtaccactctctagcaaaatatcacttttggatgaactcacttttggtttgctctcaccgtgaaatcacacacaattgcaccacaataaacttcatggtcaccaacctcaacagggtgcttagtattgctcacaaaactctctctgtttctctcggaccttgaacatgcaccagtcctacttactcaccaatcctcactataactcatctcctcaaatatatctgcccacctcactgttcgtcagcacgctatgttcactgtcacctccgcaaggtagtgtctgccttggccaggtcctcttggcaagctggtgtatccattcccccagttgcttcaggtatttgccactaacggctcaaagcttcccccttctctgaaggattggccctggcctatgccatgcaggggcaaagcagggttgttaagccttgtctcaaatcatgacaaccttgagttgtcactaatgctccagagctccccaggagatggggctgaggtggactctggctgaggccacatcttgctgagctccttcccctccatattctgctcattcaccttctgatgtgtttctcctgagagcactccttcaacaggtcaattgcatagaatccctgtcttgggctctgcttctagggcagttgatctgaaacagtagctttgcttacatttccattttccctgagtgtaatcacttctcctctgtaattctgtttatcctttcaatcacagatcaaattctcccaagaagctttttcagacgttaattttcaaggaattgtcattggttatattactcttttgattgttcatggtttcagaaaaagatccagtaggcctaatacaccagaaattctgaaacttttgtgtgcagtggacctctttggaaggctggtgaagcctgtggaacctttcttagaagaggcttttaggccgggtgcagtggctcctgcctgtaatcccagcactttgggaggccgaggcgggtggatcacgaggtcaagagatcgagactatcctggctaacacggtgaaaccctgtctctactaaaaatacaaaaagattagctgggcgtggtggcgggcgcctgtagtcccagctactccggaggctgaggcaggagaatggtgtgaacccgggaggtggagcttgcactcagctgagatcgcccactgctcttcagcctgggcaacagagcgactctgtctccaaaaaaaaaaaaaaaaagagacttttaagtatataaaataaatagaattacaagacaaatatgattaagacaagcctgggcgacatagcaagacctcatgtctacaaaatatttaaaaattagctaggcatggtggcgcatgcctgtagtcccagctacttgggaggctgaggtgggaggatcacctgagcccaggagtttgaggttacagtgagccgtgatcacaccctagcctggggaacagactgaaaccatctctctaaaaggagaaaaggaataaaagctaccttgtaacatactactatgtttgctgctttattaattcattaaataacacaatctagcattgggtcaaataatgtaaaaataggattaaagtaagtgatattttgagagatctactacaactaaaatgtggtatgaaaatatctatactttttatgattgacaaagtcaagagtactacaggcagcactgtaatctgtgacctgcattcataatgaaaggaaatgctaaacttcagttagaggttagtgagaataaagatgtgatttttggtttttcccccatccaggttcacagtgctgattcctattcatggacacctagggggttctgtagatcccaagtcaggactcctgtgctggaggatttgcaggcctgggaagcagacattcaagtcactcagcttcacactgaacactcaagtgtaggcagctcatccatcattatagcctcttgtgctaagcagaggagactccacaacagttagaagagaacaagatggtataacctccctcccatcccccaggagataggttaagaaacttttcaaaggtcctgacaggatttctccattatcaggcagtattggtcaaagatgccctcatggggacttgaaggccaggagagcttgctgagttcatggggagaacacagtggccttcagacaataatggtctcatctccttggcctgtgtccactggtaacctccatcagttcctttcaccctggtgatggccacttagtgttttatcagttagcagatattttttgagtgttaggtggggaacaagtctgtgcagaatttagggatggaaatgatgtagtcaccctcaagaaaattagattattatcagagattggattaagatggtacatctctcttctttcttatcccacatttcctgacgtaacagaaaatgtagttttttaaaaagagtaaatttggcggggtgcggtggctcatgcctgtaatcccagcactttgggaggctgagggtggcagatcacctgaggtcaggagctcaagaccagcctggccaacatggtgaaaccctgtctctaataaaaatacaaaaattagccgggtgtggtggcgcgtgcctgtaatcccagctaccagggaggcggaggcaggaaaatcgcttgaacccgggaggcagaggttataaatcttccatttttttcttagtcagaaggagaaatatttggagaagaaaaatagtgacgaatattaatagtgatgtggaagctgggacgagggagtctatgggagcaagacggtggtgctctctggttttggttggtttcatgggatatatgaatggaaatagaggagtgtgttatactaatattatattagctataataacagctctatatttacccagtacttttcatttgttcaaaactcttacacattacctagtttaatcttctcatcctactactatataggagaatgtcgcacctaaaggattgcagaggaggcacaaagcctatgcatattccccaagaatagaagcactkggaatgcctttgcgttgccacctttttggctggttgaggtatatacgaaggaggaacttatcacagagaacctagctagtggttcttaaatttcagtgtgtattaacggggagcctgttagagatatattttctgggcccccatcactgagatttggattcagcaaatgaagtatgactcacaagcctgcacttttaacaagagctctggtccatctggataggtgatccaaaaccatacttccagaagagcgggtgaggcaaatcttcctgtaccagtttgtctttaggtgtgtcaattgtacacacctaaaatcgtgactggaggccgggcttggtggctcacgcctgtaatcccagcactttgggaggccgaggcgggcggatcacgacgtcaggagatcgagaccacrgtgaaaccccgtctccactaaaaatacaaaaaaaaaaaaaaaaaaaaaaaaaaattagccaggtgtgatggcgggcgctactcgggaggctgaggcaggagaatggggtgaacccaggaggcggagcttgcagtgagccgagatcgcaccaccgcactccagcctgggcgacagagcgagactctgtctcaaaaaaaaaaaaaaaaaaatcgtgactgtaattgttttgagacgggtctcgccccgtctcccaggctggagtgcagtggtgccatcacggctcactacggcttccacctcccgggcttaagtgatcctcccacctcagcctcctaagtagctgggactacaggtgtgtcaccacgcctggctaatttttaaattttttgtagagtcgaggtctccctatgttgtccaggctttttttagtttttatgattgttactttaaggatcagtctgaaattccctttagtcacacttacacgcttgaactcatttctgacactagttatgggcctgtcctggggagttcaagtccgggacacactattagggaaataactgtcagagcaaagaacaaaaccctgtaagaaaaaactacgaggcgacgggtaatacagaggtcctgggcactctcggagactggcggagaaaccygacacacacctcccatgtctgtactgtattcctcgagagcctgacatacaggtattcagtgagtactggttaaaagaataacaaacgcattgacacacaaattttaacagcttcccaaggattttctctcaatcgcttgttaagctcaggtcctcgtctgataaacatgacgctacatttttccycctaatgttattttgaagtttcgacgtagattaaatatggcgactgaaaacaaagcaagagacaaagtgcttgcgcatcccatgacctccccaccggcaagaaaaaggagaaacaggcgtgagcaagcagtgctggttggcgcagagagagaaataccaggaactcagtacaggccggaagtcggggtacggggccgcgccagcttcaggcgtcacttcccacgcgacttcctgcgggaaacatggcggyattgagcggagtccgctggctgacccgagtgaggccccgggacatgtcgggcaggggcgggcgaaggagcggagagtttgtcctagggtttcctaaacagggcaaagtcaactgtagtgttcggggtctggatgtctcaaakctgaccttacaggcttgtgtgtccctgttgcaggcgctggtctccgccgggaaccctggggcatggagaggtctgagtacctcggccgcggcgcacgctgcatcgcggagccaggtatgcacgaatctggctggggtctctcttacgaccctgtcccttcctcgctgctccctcccctggcttttccccacccctcccgggtctccctacttctctactcccaggatccgtgctcccgccccagctctatctttacttctcccctcttcccccaattsaggccgaggacgtgagggtggagggctcctttcccgtgaccatgcttccgggagacggtgtggggcctgagctgatgcacgccgtcaaggaggtgttcaaggtgagtggcctcggggatcagacagtagaggacagtagtgtgttggaaaggacttggccttgactgtgatgttttgggaacctgtctctgaaggctgccgctgtcccagtggagttccaggagcaccacctgagtgaggtgcagaatatggcatctgaggagaagctggagcaggtgctgagttccatgaaggagaacaaagtggccatcattggtatgtgtgccctcttgccacttgtccatgtgccatttaaaatcaaatgaccaaatgtttattaagcccttctccccacatgctatgcaattatattaactccagggcaaccaccattggtatttggacatttgttccttcccattgggagcccaggagttgagagatcatgtcagctgtctatgcagaaaagttccaggggttctgagtctgtcctgaggctacatcaactgtcatcaaatcttattcattgcatttctggaatacyacttttagctgccccttttctttttttttttttcccctcccttccttcctctttgtttcttcttgctctgtcgcccaggctggagtgcagtggcgcgatctcggctcactgcaacctccccgtccctggttcaagcaattctcctgcctcagcctcctgagtagctgcgactacaggtgtgcaccaccacacccagctaatttttgtgtttgttttgttttaagacagagtctcgctctgtcgcccaggctggagtgcaatgttgccatctcagctcactgcaacctctgcctcccgggttcaagtgattctcctgcctcagcctcctgagtagctggctggtattacaggagcgtgccaccatgcctggytaatttttgtatttttagtagagatggggtttcaccatgttggtcaggctggtctcgaactcctgaccttgtgatctgcccgccttggcctcccacagtgctgggattacaagtgtgagccaccatgcccaggctaatttttgtatttttagtagagagagggttttaccatgttggccaggctggtctcgaactcttgacctcaagtgatccacccacctctgcatcccaaactgctgcgattataggcgtgagccaccgtgcctagctgccccttttcttttgtcttccgcgctttaatctcctcatttgatttttttggcttctagttctgcccctatagttcatcttccatatctcttcttggaaagaacagcctgattttccaggcccagccttaccataggaaagtcagtactttataagttggcccttaattttctgccttggttccacaactcttgttctgtgcttcaatcacactagattgtgtgttagattccaaatatgtactacctgacttatattgttccctccacccagaacgttctttctttggtgctacctgttagagtccttctcactcattcactgtattagtttcccatagctgccgtaacacactaccatgaacctggtggcttatcattaacagaaatgtattctctcacagtgctggaggccatcagtctgaaattaaggtgttggcagggccctgctccctctgaaggtttaggggagaaacctttcttgcctcttctggtggctcttgctgttttttgacttgyagatgcatcactccaatatctgtggttttcttccctctctgtctcggtatcatttttctcctcaaatatttagccctggatgggacgattttttctcaagatccttaacttaattacatctgcaaagcctcttttcccaaataaggtcacatacataggttctggggctcaaggcatggctgaagtgccagctcttctgtgctgtatcctgatattactggagaggatttcctctttgtgttgctatgcaagtttcccatggtacttatcatgtctttcatattttctctctttcccagtgtaccgtttgcttctcaagggcaggagttgtatggttttagttgttatccttattgcctgacatataattgatattcatcagtaggtgttgggttaaaaaatgtcaaataaggagaaggcacagataaaaagatcacagatctgctagcattgtttttcaacttgttgttaaacccaggctcttttttgataaatagaaaaaatctgttctccgttttgaagtttcaacataaattaaatatgttgactaaaaataaagcattaaggccggggcgggtggatcacttgaggtcaggagtttgagaccagcctggccaacatggtgagacmctgcctctactaaaaatacaaaaaattagccaggtgtggtggcacatgcctgtaatcccagctactggggaggctgaggcaggagaattgcttgaacctgggaggcagaggttgcagtgagcccaggtcgtgccmctgcactccagcctgggcgacagagtgagaccctgtgtctctcacacacgcacacacacacacacacacacacacagaaaatgcaatagatgaaatgtttctggctttaactacattattctcttttgtcccttgcccccagagacaatttaaaagtttactgatgtgggaatgggagatgggagtctgggttacatgatgttcctaagggggttagacactggtctgagttcccttgggcttggcctgtggctgacactccttttcccactttgttttcacaggaaagattcataccccgatggagtataagggggagctagcctcctatgatatgcggctgaggtaggtggtctgggtggggtgaatggttgagaggtgccagggcaccaggagcagagctgatggccctgcccaccctcaggcgtaagttggacttatttgccaacgtagtccatgtgaagtcacttcctgggtatatgactcggcacaacaatctagacctggtgatcattcgagagcagacagaaggggagtacagctctctggaacatgaggtgaggccccagaaactgggggagggcaaggatgaagatgggagagaggtggagctccttgtttcccttcccagtgtcacctagctgctgctttcttcttacccagagtgcaaggggtgtgattgagtgtttgaagattgtcacacgagccaagtctcagcggattgcaaagttcgcctttgactatgccaccaagaaggggcggggcaaggtcactgctgtccacaaggccaacatcatgtgaggggcatggctttgtgtaggatgggttcctgggaaggtagcccctgtactttcttggctgattctgtcccctttggcccatggacaggaaacttggggatgggttgttcctgcagtgctgtgaggaagttgctgaactgtaccccaaaatcaaatttgagacaatgatcatagacaactgctgcatgcaggtgaggcctccccacatctctactcatggggcggaggaggagggtggggagtggaatttacttcatgcctgcatctcaccctctagctggtgcagaatccttaccagtttgatgtgcttgtgatgcccaatctctatgggaacattattgacaatctggctgctggcctggttgggggagctggtgtggtccctggtgagagctatagtgcagaatacgcagtctttgagacggtgaggctgctttctccctcggcccttcctctgacctcaagtccgccattcctctcccatcccaatatctccacttcctaagtgatcttggcctrttcttcccccacgctgcccaccatgcctcttttcagtgaccctggcctgagctccccctcccataatgtccttttccaacctaagcctctgcrtacccctcctgcctcctcccagtgtctagcctgcccctctctccacagggtgcccggcacccatttgcccaggcagtgggcaggaatatagccaatcccacggccatgctgctgtcggcttccaacatgctgcggcatcttaagtaggtcatgggaggctgtcggcagaggttgggtgtcgtgaggaggagcaggtggggaaattagcgggaggtgtcttgggggagtcacagtttcttcctgtccatatccacagtcttgagtatcactccagcatgatcgcagatgcggtgaagaaggtgatcaaagttggcaaggtkagttgagaagagtagtgctggcttcaggatttagagtagttctggtgtcagcacctcggcactacnctctggggaacctgaatgggggtctcctttccccccaggtccccagaacatctgctccctgacatccctgcatccctctcagggctgttcttcatctcccttctcttggctgtttcatcctcttgatctcttttgcctcttagatcccatctgctgttccctctttcctgctccatccactgcccttttcatgggccatctgaatgcagaacttgcagctctccttgggggtggaacagcaagggatacaggcaggctgaagcatcagcttcaccttcacgccccatctccttttygctgtgattctttccttccacctggtcttgtctctatttcttccaaggaaggtagccacatcctgcctctgatctgcrtttcccatcatctttgcctgctcagcctcctgtcctgccctggctgcagcacagctaatagtggcttaagaggagtggcaggtccatgtgcttcccatcctggctcctccttccattcctgtgcattgccttttttctggctgtcacgcattcttggcttccatttcctcaatcacattgccctacctcccttcatgggctctcttttctccctccccacggctgttgccggtggtggctgtaggtgcgractcgagacatgggcggctacagcaccacaaccgacttcatcaagtctgtcatcggtcacctgcagactaaagggagctagagccctttatttcttccaaccttgcaaggaccacactccccatacccttcagtgcagtgtaccagggaagagaccttgtgcctctaagcagtggaccatggtcaccttgctgggtagagcctaggttgtccttgggccggcttccttaggggacagactgttgggtggtgatggggattgttaggatggagcccaggccacatggatgatgatgattctcccccacaggttcgarcctctgacatgggtggctatgctacttgccatgacttcactgaggctgtcattgctgccttgccccacccataggccctgtccatacccatgtaaggtgttcaataaagaacatgaaccaactcttgtgaatttgtttttattggggaacacggcacagggtgggaaatgtcaccttgggctatggtatgccccacctcccagagaatgtccatttgcattctaatcttcctgggatgctttatggaactttttcttcttcttggagctgctcttgccagccgcctcttcaggcccactgctgaccggctcctctttggagaatttcctctttttcttggagccacttctgtggcctgcctcctcagggtcattaactgtttcctccttgggtgtagacttcttcctcttgggaatactggtgctgccagcggtctcttcaagatcgctactcatcaactcctccttggaaaaagatttctttttcttgggtttggagaaagagatagatgggtcttccattccattctcctgaggaacctcctggggcttttgctttttcttctttttgggtttttcactcatctcctaaagggaaggacaggggaacaggctgtgagaacagtgctcattacatcttcagcaattaagtagccaaggcaggggaacgcgtgtcgttaacattgcccagtgtttctgggatagtttaattgtgtgggtataactttagaaatccaccccaaaggctgtcccaaattagaaggaaaacatgtcatgagaaattacctcagcccattaaaaaaaaaaacctaaaaaacacccaccatgctggtcgcaacagaaccatcatgccaagttccagacagggccctgaaacactgtttaagaaactgggtgctaaatgaaaatctcagggagaatgattgtagcttagcacattggggacctccctgcccccatccccactgtgaaacacgaccacctccggacacacgtctgataataagcagagcaggaatttacactaccccaggttgaggactcctgggaggcagccgaggacagaacacacatgcccagggaacgggtgtgagctacaaccagctctctgggctcttgagcaagttcagcacctatctccttcctatagaatcaagaggtagttttagatgtttcaggtccttgtttcagtccaaaagcctggactcaagaccacagcttgatgcagcatatcctttgttctgctgttgaaaatcctacaacctaggatctctgccagggccgtgctgcctactgacctcacactcctctggagtactactgctgttttctgaagacgcgagggcaagtgcagccagccgtttcttttccttctttaagcgtttcttctcctgtttctccagcttcctagtaatctcagcagccgcttcctctgcctggtcaaagaaaagtgctaaaagggcctgaagacttctggtgctctgaggactcctttctggctttattggatcaggctcattaaatcagtttttttgcctccattctacaaggtcaggctcagacagttcatcacctccaacagctagctatgccactccacacccagcaaagcccaactgacctgaaccattgcttccttcatgacatccagattctttcgtggtatctctccagtctcatagaaggacagtcgctcttcaacttgttctcgaagcttctccccgaatacactcgtgggcacctctggatgtgtgtgggtgacaaagcctgtcagcccaaagagagaaactaccccaaccctgtgttccctctaccctcagcttcactcagacccagagtctcaacactcactaggtgaactgctgttgacgaaaaatattgccatcattgtggaagctatggttgcaagcctccccacccagccacccagccccttctcacacctgccaacgcccccccacccataccagagaagcaatcgattcgtgaggcaatactgcatttgtttgccaggtatcgggagatgcggcctttgttcttggcagctgctcggccaatgaaggtggagtggaaaatgagtccatattttggrgtgttaccccttgtcttcagggctctgagagaatattcagtggagagtttaagatcagaaatttcaaccccattagccaaggcagctcagctcctcccctcctctcaccccgaagtcctgagtgagcctcaggccagattggatctctaccccaatgcatgccaacccatagctcccagaggcagagggaaggcatccaatgtcgctgacctggaaacttggtccctttgctgggccctgggaatcactcagacaccaggactggccatcacccccatagcagaggcctgtrtaggtcagggagccctggtcagccatcaccgtgatcccccaacaagcagtgggcaccagaagtggcacctgattgtgggcaggtgccctcactggtacctgaacagggccttttcagccccaaggatctgcactgtggatgctggatacttggccaggttggtgaggctgccagcatgtgcgatgagacgtgcacctacctggagagagagtcaaggaagcagtcagagaaatgaactgctgacctgcccagttgcacgacagccctgctccccacctccccatcaagcacaactagggaagacatggtgggtcacgaaatacagcagtgcaggtgcacatggcaacagtccttattctcccatttttgagtcccctgtgacgcaccgcttccccaattagggctgacaggctgggggctacttggctcatcttggagcgcaggtaagtgtgtaggctctggcggtattcagataaagacaccacacgactggagaagctctcgatgtttatcaagtcaatggcagatatgtccatgcctaggaaaaaccaagtgtgaatkcaagaggccagctatttagagccccataccttatgcaggttgccaggctctgcactgacccatggaggaccgtgaggcatccagaatagccttagccttggccccatccattgtcagctcctccagcttctccagcttgtcctcattcagttcccttcggtttccaataaactgggcaagacggcagtatrtggcattgtcgttgatgatcttcaccagctccggaaagtgatacccgtaccactccctgcaaagagccacagtcactccctggcccagctgcttcatcaaaaaccatagagctacagccttgccttctccacacctactctgcctggaggaaatgggacaaagatccaaatcttcctcaattctatgttcccccattcacaatacagaccaggcacagggcctgagctgaggtgtatatggggtaggtttactctacctcctctttctatacagtcagtgtaagaacacagcctgtggtaagcaccaggaggcctacacccagccccagcccacatggttctacccacaggatggtcagtcctcatcaagactcaaaattaactgaactacagaccaaaggctccagtattatgggtggcccctgcactttacctgacacgcatagagaaggtattgatgtccttatccagctggtccaggaggctaatggactggatgatcatattgtccacccggttcacrttaaacttaactttggcacgggaatagctgtgtcccagccccagctgtgctttacaagctgacagatcggtcagacccttcaccagattgtggaagtgcagacgaactcctaagaagagggcaagacggtgagcaacaaggggctctgagctagctcccgcacccacgggcaccagcccagcctgaaggccttcccagaaatcacaacaagcaaccaagtttccagaacctcctcccccaaaatgtccaggataacaggaatataacagatgatggtctcacctcgcaggayctcagctatgactcctccagtctggcagttgtaccctaactcctcctgtattgcggcaccaatcttgggatccccaactcccaagagtactttcttctttttggacggcaggtgggtctccaagagcaggcggaggtcctcatgaacaacccctcaggggaaagaacacagttcccactaacaggctgaaggacgatcaactctaacatccctcagctgactaccctggtcccaccgagcacgctgggatggcatacctagatccctccccatcaggcattgctcagagacatggagacatcagtgattgcactcaggggattgacagatttgattcgcaagtcatcactgcaaagcctggcccagccatgggaacaactgcattcaggtctgatagcacaagtgggcaataaataatagcttgtaacacaccctcgagtatttcgtagaatttgccttctggaaccaaacctttttttctcagcctgtgtttacccaactgccctttccaatcgaacagaaagcagagaaccagacacttgattgtgtttaggcaaaacctcaggcacaagtaggtgttaagccgaccccctttaagaaacccccctttgtcggccgggcaccgtcgctcgcgcctgcaacctcagcaccttgggaggtcgaggcgggcggatcacgaggtcaggagatggagactagcctggccaacatggtgaaaccccgtctctaccaaaaatacaaaattagccgggtgtggtggctggcacaggcctgtaatcccagttactcgggaggctgaggcaggagaatcgcctgaaccagggaggcagaggttgcagtgagcccagatcttgccactgcactccagcctgggggacagactccatctcaaaaaaaataaaaataaaaaatagtttgtcactacagtgcccacaaggaaacgttaacacacattccacatcgtctgcttaaacagtttggtctagcacagttcccagaccttgagctctgtgaagacaattatttcaaattacacattgtatggctcaaatactgcctcacgcctatcagactcagagccagccaaggacggcaaatactatcacaagctgcccgagaggataccgaaaggaaccacatctctctgtgacacttggcggtggccgacttaccttcagacacggcgttggcattttccaaggcaacctgggatgaggcaaagggacaaaaggccaccagacgaacgatgctgtggaatttgcccaggttgagcacrgactcctccacctggggggagaaagaggctaagtggtttccttccctccctcctgcctctgcggcgcagtcaagcagcggttctcagccttggaagctcttaaaatatgctgatacctgggccccacatcccagcttctgctttaatcgttcgggggcggcgtccgggaggcttatttctaattgctagagcgattctacccatgggtcaaggtaaagacccccggatctagagctttccaggcccgtccccccgccccgaaccgctcggccggccacgtgggagcgcgctgtgcatgctgggacccgcgcgatgagggtctgcggggccgccaaaggagcccacggatctcacccacctgcggctgcagcagactgatctcctccacttccttcagcgccagcagcgcgtagccgaccgcgtgctcaaacagcacgtgcaacagcacctggaacgggagccggggcgcgagcgtcaacgcaacctcagcgtctgccggaacccgttcccagggcaggcgcaggcgcaggccgcaggcccaggcccaggcccaggcccctgtctgcggcccgaacgcaggccgaaacccccaccgtcgcgtcgcccgcgccccgcaaccactcctcaccatggcgccagctcccgggttcggctcgcaatgcggctagcgcgctccggcgcgcggaaccaggctccagaggccacgcccccgcccccccgaccaatcggaggccggggacgacaccatctccggcctttggaggggccgcccagggtggtatcgcccggagcgcgggctgggtggcgccgagcgcgggcgagcaggccttttccggcctctgcagctgcgcgggcgggcgtggttgccggggacgcgcggcccccggtcgggcacy

SEQ ID NO: 95893 - DNA, 99975 bp, Homo sapiens
  misc_feature (1)...(99975): n = A,T,C or G
aatgcataggatgcagcagaggaatatttatagcactaaaatgtctatattagaaacgaaaaaaatcaatgaactcaccttccaccttaggcagccaaaaagtgaagaaattaaaccaggccgggcgcggcggctcacgcctgtaatcccagcactttgaaaggccaaggcccgtggattacctgaggtcgggagatcgagaccagcctgagcaacatggagaaaccccgtctctattaaaactaaaaaattagctgggcgtggtggcaggcacctgtaataccagctactcaggaggctgaagcaggagaatctcttgaacctgggaggcagaggttgtggtgagcaaagattgcgccattgcactccagcctgggcaacaagagcaaaactccgtctcataaaaaaagaaagaaatgaagaaattaaacctaaaatctaaaataaatggaaaaggaaataccaaacagcataaatcaataaaacagaaaatagaaaaacaaaatagtaattcaatgtaactaaaagtgggttctttcggaacatgaataacattgataagtctctagccagactgatcagcaaaaaataagaaagacacaaattactaatatcaggaataagagaccctatagctatttgaagaataatttagaaatattatggacaaacttatgcataaaaagcttgacaacttagctgggcatggtggctcatgcctgtagtcttgggaggccaaggctggaggatcacttgagctcaggagttcaagaccagcctgggcaacatggcaagaccttgtctgtatcaaaaaaaatagccaggcacggtggcacacacctgtagtcccagctattcagaaggctgaggtgagaggatggtttgagcccaggaggcagaagttgcagtgagccaagattgggccattgcactctaacctgggtaatagagccagaccctgtctcaaaaaaaaaaaaaaaaaaaaaaaaaaggttgacaacttagataaaatgaayaaattccttgaaagacacaaactatcaaaacccattgaggaagaaatagatatccaaagtatccctatatctattttaaaatttgagtttggagtgaagttcagtagaaaactctccagccgagcctaacacaaattgctggccatagaactggttgtcgtcttgtcaccacattttcatgtggtttgttatacagcataggatattatttattgttgtattatattaattatcaccacgaaaatatttattcactctccagtgctcagttcaaatgtttcctctcctgcaaaaccttccccatcttcctcccacatcactgcatccaaacacacgaggtctctttttttctctctatgctttcccttcattgtctttttggaccacttggcttaaagtcgtctggcctacgtctctcctcccctgtcctagactttgtgcttgtcatgggcaaaaaccatgtcttctttagccctacattctccacacttagcataatacctggtgtagataagcacccataagaattcataaaagagccaaaaagtaaatgaaattggtaatgaatgaatgaatgaagtgactgattgaattttaatatgtaatattcattgagagtataaaatatgctagtcacttttctaaggttatcataagtatttatttaatccttccaacaatcctttgaggaaagtactaatattattcccattttacaaatgaggaagcagagatttcgagagttacttagatcacaaaatagtaaatgacagagctgggactcatacccaggtagactggctctagtgcctaatctgtatgttatgcagtactacctacacaaattctaaagaggtatccagtgataaatcccatcacaggcttacaaagagatacagaggaaaaatgaagcagaaacaaggaagtgtgtctgtgctgtggtacccagccctagggaggcattcttggacgcctcctcccaatctcctttcctgcaactgcttagtttattggctctctcattcctatgctgatgagcatccctattcccagaagcagcctcttcacccgtcctatgtctggctctaaaccactcctcctcccaaccttgatcacacttgcctggggaagccagcctcaaagagctgaattcaacatatcccattacaatgaatgttagtaccagggactccccctgacattatgtcatttctcctcccagcaaccttcaaaggtggaattattacacactggtactggtggggaagctgaggcttagagcaaattctctacattccttgctctcatactagtcttcacatacctttataatcacttaccatactttattgcaatcatttgtttatgtgtcaacggttgccaatctgcaggtggaaacacaggtaaatatatataaaatgatgtattgatgtcacattacaatagattatatgttcagtgaccttaacatgatacgttcaatgtgttgtccctcctcagggcataattggttgtgctgtgcaaaactgcaatggaagtggagtgatacgcagcaactccatcattctcacagactgccttggatgatctgtgcctctgagtttcatggaataaacctgcagttttagtatgcctcagaagatgtaatcaaggcggttcaatctggaacaaaattaagtaatattacttatatagtcagactttctggccattctgtcgtaaatgtgctttctctattaaaaaaattaaaagtatatagatgcattaaactatttttatacaaatatattcacattataaaaattccttaaatatgtaagccggtaagagagtgaaaaaataggcagttcccccttccccactcctcttccactccttcccccagaggacatgcctgttgtcagtatgaagcatgccccttccggtatttcttaacccttaggaatgagagtagggcaccttctactggtagatgggggaattacaggtatttgtaaaatcatctgatggccagtgcttcagactgaaggaccagccttctgtttgtttgtttgtttttgagagggagtctcgctctgtcgcccaggctggagtgcagtggcgcgatctctgctcactacgagctccacttcccaggttcacgccattctcctgcctcagcctcccgagtagctgggactgcaggtgctcaccactgcgcccggctaattgaccagccttctgtttaatcatgaaatgcatgtaggggtagggaggataactctataaaaaggttttggtatcttatgtttgacactggcaatccccctcatctgattctgcaatatgtgacctcccaagggcaccaggccattaaattatatggtcaagatctcactgaatcacaggtgattaacgagtccctcctgtgaccaggttctggggattcagcacagatgattagtgctttctgaaggtttatcatcaagggggtgggaaggtgggcagtgggatggaagtgggggaaggtagggggagatagatgataagatggataatcaaataaaaaatataaattcaagtaatgattggtacactgatgaataaaagtcaggatgggggtatgtcgggggtgggatgggcagggcaggctctctgacggtggtatttgggtagaaatttggcatgaatgatgagggagagccatgtgaacatctgaaggagcaggttctggagcaggggagcaaagccatttgggagtacccctggtgtgtgtgaggaagataaaggaggcaatggtcctgcagtggaaaagtgagggtagggttaactggaggggaacacagatcctgtagagccctgaaagctgttataaggacttgggcttctattgtgattgagatgggaagcccaggaaggttttgagcaaagaagtgacaggatatgacttgtgttctaaagaaaaccctctggctgctgcggggagtccatggaggaggttgttgtaaccacccaggtaagagatgagggtggcgtggtccagtttggtagcgatgggtaggtgggaagtggagaaggcagagcccacaagaygtgatgagggactggctatgggctgtgagggaaggaagcatgcaactaacaccagtgcttttccacctgagcaattcagggactccaggtgtcacagggcacagctctattgctcttcctccatgaggtgggccctagggagctgtgatgtgggaagctccttccttcctctccagtctcactctggcccctcttcggccacttctctgtgtctgactccctaatcactgtgctgcgatcctggcttcagtccagaatgccaaagctgcatcttctttgataacattccctggtgctcagagctccacaccagtcctggaaggaaaagcaggtttcagagggaaaagaagccctaaggcccagctgggaggctggagcaatcagggaggacttctcataagagctggccttgaagaacgttatgatttcctcaaattcaggcagggggagaaacatgagaaggaaagatgtgttaatgaaccagagtgacatgaggctgagaggcagatagaaaggaccgggaagagcctgacctcgactggctggaattaatcccaatttagtgggttacagcagtgccgggtgggtggggaggggggctgtaacaggtcatattttcccaaaatggccacagtagtatttctaattctatatgctctcctgtctcagtcaaaaggtggagtctaatttctcccttggaatatgggttgtcctttgagactgccttgactgctagagttcagtggcagtgatcctatgtgacttctgatcaattataaaggccatatggcttctgcctctctctctctctctctctctctctctctctctctctctctctctctctctctctctccccacccgccccgacctccaccggcgctcacccttggaacctagccaccatgttatgaggaagtccagatcacatggaaatgccttatgtgggcattcagccaacaaatcagctaatcaaccaccaatcatgtgagtaaataagcctttaggtaacgtcagcaccagacactgagttatcctcagccctcaagtcttcaagctgcgacccagacagtgtggagaagaggcaagccatccccactgtgccctgtcggaaatgctcacccataagaataataaatgaatattcttcaccactacgtttagggatagtttgttatgcaacaacagcaactggaataagccccaacacaggtcagcctggtgaaaaactccctggtatcattaatgtcccccctattatctccagggttattagtgtctaactaggcattatgcacaagcatcagagccaaattacagtctatatctaattactattttattattattccctgttatgcttggctagtgggtgtttgttggggtggcgggcaccctccccagccagggcagggacaacccttgtgaccccgcttaagaatagggttttctcttcatgatgccttcttgtggtcaacgatggcaaaagaacaaaactggagtctccatatgactctgcaggaaggaatgtgacctgaagcaaggggcttatctgcccatctggtgactcccaggtcagccccatctcaaaacaagcccgcttcaaccattcatgtatccattcatctactcaacaacaacaattttgaacagctattgtgtgtcaggctctatgttatccacacaaggagacagtggtccatctctccatggagcttctatcctagtggggagccagaatgcaagtaatcgaacaaagtgctgacaggctgtgataagtgtgatgaaggaaagacacaggttttgttccaggaataataggcaacttttctctgagccccggggacgtttctgtggaattgtgtttcagctgagacctgaaggatccaagcctggtaagtccatctgtagcaatggacattcactggctgaatcgaggagaggagaaaatgttgaamggatatmaggaaactcacagaccagctggaaatattagggaatcaggcttagaaaacacgcaggcgcaaagagtgaccatgaagcccagcactacagccaaaactgcaccacaaagcccatcaggtaaggacatcattgcttgacctaagaataagatggcaggagaatccattctggccaccagggccatcaccattgcccccagaatggagtcctcaccatgccctcttcttgacaccagctcccaagtaaaaattccaggtgagaacatccgctaggctaagcctgtcatgtgaccatgccctcgctgcagcaaaatctgggaaagtaactatttagacaagatgcctggatctgcagcaaccacctggtggcaatgaagcaacaggcacagaaaacagccaagagtcaaggatagtgaaacacagacgttgaaggaaygaggccctttggcgccactgctgagctgctacaccagtcttgagactgtcaaattctggacactgtatgaactaaacaaataaagatctttargattttaagccaccattgtygaagatgctgttacttgcagagaaggcatttttaatcattacgaagaaaaacagatccacactcgaggagtttttatctaacgtgactggtagaatgtgctctaatggatgaggatgggcagggtggtaaggtttctcaaatttctgtgtgaatcaggatcaactggggctgcttattaaaatgcagattctcacaatccatccccaagctcactggctragactcaacgaggaataagcatttttatggcatacagatgtgtctgatgcaggaggcccactgggcagacttggtgagcagaggcacagggggacccgggtcagctgcaatgtcttcctcttcctctccaagtcccagcttctcatctgcaaagctaaatgtgatcatggatgtcaaggccttaacagtgcctcggtgggcacagtcataatacaaataatatttattgtaccagaaggcctagggatcckggctctgccccttaactggctgtgtgactttggggaaattacttaaactctctgcacctcagtttcctcatttgtacaacacagataataatggtgctcacctcatagactcatgatgatgggtgagttactatatgttgaacacttagaatagcacctggcagatagtaagtgctcagtaaagatcagattgaattattacagccagggccaggcattggctaaagcatcatctctgtcaaagtggttccttactgccgccccacagcaccaggatttgagagtacaattcattctgactggaggtaattragaggacttttgaaagaggtgagatttggatttctctttagtcagaagtggtctaatcagggctgagtctgtgacatcagggagatgcctacattgagggatctgaggatctgcctagagcacagcagaggcccccttttctggagaatcacaggggtaggcttggatagctgtggctggaatgttaagactcaaggatgctgagggctggggacagcctgctgaaatcttaattatgaccagcagagggagccctagttactacagccagcctccagaatttaacaactagtcaacgccagactcaggaacctagtgatttcaacgtgcaacccgggaggcggagcttgcagtgagccgagatcgcgccactgcactccagcctgggcgacagagcgagactccgtctcaaaaaaaaaaaaaaaaaaaaaaaaaaaaggagtgagataagcgccctccagagtacattgagagcagctgggaagcttgttataaatgcagatcctaatccaacatgggaggcggggacaaggagctggggtaacatacagatgtgtatcaggccttccaatctcttggcctcacctgtcacttgtgccagtcgctgctgcaggaactggtgttgtcacctgactgcatctccctttgcacccgtaagcagccacacacttcaaactggaagtacagaggagttaataccctgcatgatgatcctttcatcaaagagatagggctcaatggatacattcttccacctttctcacagaggcgcacagccctgaaaagcagcttataatgacttatcgaaggcaatcatttgggagtttgggcgcactggctcacacctgtaatctcacattttgggaggtcaagacaggtggatcacttgaggtcaggagttcgagaccagcctggccaacatggtgaaaccccatctctactagaaataataaaaaaaaaaaaatagccaggtgtggtgatgcatgcctgtaatcccagatactcaggaggctgaggcaggagcatcacttgaacctgggaggcagaggttgcagtgagctgagatcacaccactgcactccagcctgggtgacatagcgagactccatctcaaaaaaaaaaaaaaaaaaaaaamaaaggcaatcagttgcacttagcagtggctagctcaataacaccctagtattggctctttctctaggaaagccctccttaataaagtgtctacatcttcacttgagcctctgctttcttgggatgcagactacaacaaaatgaaacaaaaccagccatatgttaaaatttgttgaacctgtcttgatgggtacatgggactttattatcctattctctctatttgtgtatgtatttgaaattttccktaacagaaaatacatacatacatacaatgcatattctggagatggaaattcaggaataaggacctctgtaaaagcaatgaaaatgctgacaaaaattgtcaaaatcaattttatagaactcaaaattaaccaaatttacaataatctgaggagcattcattccagaaaattgcaaaatctcaataaaaacaccaagatctgtgactttgtaatttgacctgtttccctcccccttyctcttctctgtagccttataacccggaagcctcacaatcacccatatctttaaaaaccagtaacgcagccaccagayggggcagaccagtttgaagctccttatgtagcctcatccccagaacattgtcactatttgattcatcttgcagctccctggaaaggtgttgtttttacatgatctracttaaattttgccctggaggagaagtcctagtcccaaagtgtttttcaaaaacaatcagcagcacctgtttaacatcacagctgcctggagcagtgataccaatttagtcaaacaagagcctagccaaaaacgtagagaaagatgtgagaagtgaaatatccacattgaaaagatctggcwtattcctgaggatctagaaggctgttttgtgagcaggcttgtgtgaggcctcgagaaagcctcaatatttcacatatatttggccttgaggtcttatgccagcaggaagtaaaggctaaagcagaaatcstagaactgccaagtgatgcagatgtgccccaacacacacagagagccccttagcaaaggatacaaacacttattgatcaaggaatttaagagaatctccggccaatcgttagctgaccactaagccaactgaacagagacaacaatagcagcacagcaaaaaagtgtggaaatctgatttccagagttcccaggttctawgtagaatgtccagttttcaacacaaattatgagacacacatgaaacaggaaaatatgtccatactgagaaattaagtattaataaaaactgtccccaaagggaaacagatattgtacctactaggcaaagactttaaaatcagatttataaatatgttcaaagaactaagagaaagcatgtctaaacaattaaaggaaagtataggggtgatgtctaaccaaatagaggatattaataaagagatacaaattayaaacaagaaccaaatggaaatcccagcattgaaaagcacagtgacttttcataaaataagtaaaatgaaattttgactagagaggctcaacaacagatttcagatggcagaagaaagaatctattatcttgaagacaagttaattgagattatccaatctaagaaacagaaaaaaaaagaataaagaaaaatgaatctgtatgtcaccatcaagcacaccaatgtacatataatgggagtctcagaggagatgagagagagaaagaaatggaaataatatttgaagaaataatggataaaatttttctgaaacttaatgaactccacataggagaaaatcaaggaaattcacacttaaacatattattatcaaatagttcaaaggcagaaagaatctgaaaattaaaaaatgaactcattatatataatggatctttaataaggttaaaaggtgacctctcatcagaaaccacagaggccagagattagtgggatgacatattcaaaatgttgaaagagcaaggctgtcaaccaagaattaagagaaattaagacattcccaaataaataaaaacagaatttatcactaaccaacctgccccacaagaaatactaaaaagaatctgcaggctgaaatgaaaggacactagaaagtaacatgaatccacataaataaagattcttggtaaagttaactgcttagataaatataaaacatagtacacgtgtattattttttgtaactctcttttttcctatttgattttttgaaacttactacaaagcaacagtaatcataatagtgtggtactggcattaaagacagacatatggactcaaaggaatagaatagagagcccagaaataaatcttcacatatatagccaaatgattttttgcaagggtgcccaaaccattctgtagggggaaaagacagtcttttcaacaattggtgctgagaaaackatatccaaatgcaaaagaatgaagttggactcttacctaataacatatacaaaacaaattcaaaatggaccaaagaactaaatctaagagctaaaactataaaatccttagacgaaaacagagggcaaatatttcatgacattggatttggtaatgccaccaaaagcayaagcaataaaagaaaaaatagacaaattggacttcatcaaaattaaaaactttgtaaacactatcaatagagtaaaaaggcaactcaaagaatgggagaaaatatttgcaaatcacatttctgataagggattaatatacagaatgtatggagaatccttaaaactcaagaacaaaaaacaatccaaaattttaaaatgagcaaaagacttgaagagagatttatccaaagaagatatgcaaatggccaataagcacataaaaagatgctcaacatgactaacaattaagaaaataacactcatttggatggctgctataaaaaaaaaaccacagaaaataattagtgttggcaaaaatggcactttggacaggacagccactatgaaaaactgtatgacaattcctcacaggatcctgtataatttcactcatgtaagttattaaagtagtcaaattcatcaagataaaactatgatagtggttgtcaggggcttggggtgggggaaattaggagttattgtttaatgagtacagagtttcagttttgcaggatgaaaagagttctggagatggatggtggtgacggttgaacaacgatgtgaatgtgcttaatgccaccgaacagtgttcacttaaaattgtcaaaatgctaaattttatgttacgtatattttgccacaaattttttaaaaaatcaattattttaaaaagacaacagcatgaagcaataattataaaactatgtttatgtgtttataatgtataaaaacgtaatttgtatgacaataatttcacaatggaagggcaaggaaattgagtgttattgaagcaaaatttgtgtatgcaattgacattaagttagtattaatctaaactagattatttttaaagttgagatgctaattttcaccccagggcaaccactaagaaaatgacttaagaattatagtgaaataaataacaaggaaattaaaatggtacactagaaaatattcaacataaaataagtcagtgacagaggaataaaagaacaaagactcgggacagaaaacaaatggcaaaatggcagatgtaaatcctattttatcattaattacattaaatgtaaatggcagctcagagagggtcctgtcaggggtacatgcatcttaacagagatttcatgtgaatagaatgagwgcttgagattttaatgctggaatttcagtatctgccagggaattggggatatacagtcatatatgtcaagtaggggcacacagagtgaagctactaattaggccgaaatcagactgtaaagaacagtgtctttcaaacgattccagctgcaaaatgctttcttcaaatcaaacaactaatgaaactttgatgtacataaaatagtcagggaagttctatgatttagtgggtgttggggccaggagctgggctcactctacctcccctcgtagtaaacatttgtgatgtactatgtcttcctccgtataccactgttaacatcccatatcaagtgcatgccatggcatctctctgctttgctttcagaggagcttgagaagactgctcagccatgtgttgtgcattccagaagtgtgggggtgttaacctctggaggtgacccacaaccaatggagactggtatcagccctacagttctagagggacagttctaggatgtattccatacagcttctcagacagtccccagtaagactgagccccagttacccacagtgawctactcattcacaaacacttgacygacattcctcccttcccagtatcactcctaatgctccttcacttctgcttctttgactcacctcccaaatcgactatatgtacccatgattatcttagggttttgcttccaaggaaacccaaactaagacacccctcaccctgccccaacatgtctcccaagacacttgaagtctcctctgtggaatgtgtgtggcagtccctaccctaagctctccttccctgtgcttctcaatgatcttaaccttttgctcctcacctctgaaagccatctggactcagggaaaagttgacttcatacaatattttaaattctttatgtatgagaaaaataagataaacaggcyatggtgattrgatgtgggagttgaggggcaggaggagtagaagaggaccacaggcttccagctggagttggaagacaggaactgacaccatcaaagcargttaagggaagacaaaaagacagcttgggacatgtgtttttggtgcttgagggatatcctggtggagtttctccagtagacattggttattgttttctggaactcagaagataagagatatgaaacacatyaaactacaggtgatattcaaagtcatgggcatggatgagatcactcaaaataaatgcttagagcagaaaaagaatttaagaatcactgtcttttaaccatggtgaattctgaaggctggattttagtggtattggaatgaagaaacttttattttcactttatacacttttgatttgttgtttaatatatacgtatctgtaggagttgagagtgagagaaaagagtgaaagacatggtgacaaagaccctcccatgttgtacctgctgcacccttctcctcacatcctctcggcacctgtaggaggggggccagcttcctaacccatgacccaactcagtgggcaggtttgttctarcctcttgacattagctacgccaggtctggccagcacggtgcccagacattgcattccatggggtttgctcaagggaggtaaaagctttatttgttctacagagtcaccacccaacagttgccaagcccctttggaatgttttggagggcagtttcccaagataggcatcaataattacacatatttttcagcctctttgagcaaagtcatataggattatatatctgaaattttggtgtaaattataatgtgctgaaagcactaacaagggggttgttattattacccaactvttgtcaccagcaatggcttcttcacaagcataaggcttcatgaactctcagagaggatggcctcaaggtgatctatgaatcccaaacttctgtgagttgtgaacgtcctcacaattttcacctttctckgagaactattgattctgtctttacttaactttttaatgtttttatacttttattgagatataattaacatacaatagaatataaatcttaagtgttccatttgatgagtttttgttatttttaacttttactttaggttcaggggtacacatgcaggtttgttacacagaaaaattgtgtgtcatgggggattgatgttcagattattccattcccycaagtaataagcacagtacccaataggtagtttttcaatcctaaccctcctcccaccctccacccccaagtaggccctggtgtctattgttcccttctttgtgtccatgtatactcaaagtttagctcccacttataagtgagaacatgtggtatttggttttctgtttctgtgttagctaaattaaaataatggttcccagctccatccatgttgctgcaaaggacataatctcattcttttttatggctgtatagtatcccatggtgtatatgtaccacattttctttatccggtctactgttgatgggcattaaggttggttgcatgtctttgctattgtgaatagtgctgcaataaacatacacgtgcatgtgtctttatggtagatttatattcctttgggtatatatacaaaaatgggattgctggttcgaatggtaattctattttaagttctttgagaaatcatcaaactgctttccagaatggctgagctaatttacattcccaccagcagtatacaagtgtcccctttctctacaaactcaccagcatctgttatttttttgactttttactaatagccattctgcctggtatgagatggtatctcattgtggttttgatttgcatttctccaataattaatgatgttgagmagtttttcataggtttgttggccccatatatgtcctcttttgaaatgtgtctgtttatgtcctttgcccaatttttaatggggttgtttgtttttgcttgttaatttgtttaagttccttatagattctggatattagacctttgtcagatgcatggtttgcaaatattttcttccatcctgtaggttgtctgtttactctgttgatagtttcttttgctgtgcagaagctctttaatttaattaggtcccatttgtcagtttttgtttttgttgcagttacttttgtcttctttgtcataagatctttgccagggcccttcctagattttcttctagggtttttgtagttttaggttttacatttaagtctttaatccatcttgagttggtttttgtatatggtgtaaggaaggggtccagtttcaatcttctgcacatggctagcctgttatctcagcactgtttattgaataaggagtccttcccccattgcttgtttttgttgactttgtcraagatcagatggttgtaggtgtgtggctttatttctgggttctctattctgttacattggtctatgtgtctgtttttgtacctgtaccatgctgttttggttactgatagccttgtagtatagattgatgttgagtaatgtgatgcctctggctttgttctttttgcttaggattgctttggctattcaggctgtttgggctccatatgaattttagaatagtttttctaattctgtaaaaaaatattatcagaagtttgatagaaatagcattgaatctgtacattgctttgagcagtatggccactttaacaatattgattcttcctacatttgatgagttttgatcattgtacccaccatgtaaataccacccaaatcaagatgtagaacatttccatctcctccctaaaatagaatttttttaaatttttttcaattttttattgtggtaaaatatgcatagcataaaattgcctattttaaccatttttaaaggtacagtttagtgatactaaatatattcatgttgttgtgcaaccatcaccatcattcatctcaaaaactcttttcatcatgcaaaaataaaattctatactcattaaacaataattctccattccccttttccctgaacccctggaatttaccattttactttctgtctctataaatttgactattctaagtacctcatataactgaaatcaccccatggctattttcttggtgtgaccatgggggttacatttaacatcctaaagtcactgcactctaatttgaatgtataccaccttaacttaattaatacacaaaaactctgcatctttacagttccatccccacccattcagttgtaaatgtcacaaaagtagtctcttaaatcatgtataaaacaaaaaaggarttataaaccattgttaygataatactagcttttatacttgcccatgtgtttacctttaccgagattgttatttcttcaaacagctttgagttactatatagtgtccttttatttcacctagaacaggttcagcagtgacacagtccttcagcttttgtttatctggggatgtcttaatttctccctcactttcaaaggacagttttgctggatacaagattcttagttgatagtttttttcttttagcctttttagtatatcagctcactgcctttgggcctctaaagtttttaatgagaaatttacttttaatcttattgagattcccttgtatgtgakaagttgmttggtttttgctgctcttaagattttctgtttttgatttttaagagtttgattttaatgtgtcttggtgtaggtctcyttgagttcattctactyggagttcattgagcttcttggatgtttatattcatatcttcatcaaatttggggagttttcagcaattatttcttaaaatattttctctgcccctttctctcattcttctccttttgggattcccacaatgcttatttttkcccacttaatggtgtccaccacaggtttgttaggttatgtttacttttcttcaatctttttttttttctrtttcccatattcaataatttccattgtcctgtcttcaagtttgctgattctttcttctgcctgttcaaatttgcttttcaatccctctatcaaatgttttttattttcttgcttgtacttttcagttccagagtttctgattctcttttggtttttatctcctttattaatatttccattttatttatacmtttgttctttattttcactacatttttctttagttctttragtatctttaagacagttattccaaagtctttgtccagtagatcaagccttttccagaaacagtttctgctaatttattttttcctttaagtgggccatactttcatgtttctttgtgtgcgttgtaattttttgttgaaaactggacatttgaatctaacaatgtggtaactctggaaatccaattcccccttacccagagtttgcagtttttttgttttgtttatggcttttgattttttttcttatagacygtctctgtgctgaaaatcagcctaaggcataaatttaaggttgtatcgggtctttgctgagcctgccccttttgggagcatgtgcagtcgttttttaatttcctccatraatacagttgcttttgaatgtcctagtgtctaatatctggtccccaaaagcacaaaaacagaaaaatgaagggaaagtcagatgtcccacccctttaagtaccctggaatttgcttcagctggagggagaggggcttgcagcaatgaggggaggtgtaacaacaatgattgccacctttttggctgcatctctgtgattagaagcagcaatcagcaatcagagcacagattcctgatatttggaggacagggtcccttttgcccactctggctcttttaagctgctcccagaatgyrtgcaaagtttcctaccatggagaatgggtagttgctactgcactaaaagctaaaatttagtaaaattaattgcaatttaccatccaaaccttctcttggcatttacaagccttaggtagactccagagtttcaaaatagttatatcagacagagtctggcagttcaattgttgcctaggtgaggaggcagattccttgtgcttcttattcttccatggccctagaatattctatttacttaattttgttacttaatatatttctttaaggcaactgcccactttttcttagcatcatactaagcaataatatctatcttttatgagaagccagacccagctctgaactgacaccaggcctcattctccaagtggaccacccgtcatattcctcatgagtctttcaaaaacatgcaaagaaaaaatgaaataaaaataaagttcacttttttctttctttagaaacagggtctcactctgttgcccaggctggagtgcagtagcaccatcatagctcattgtaaccttgaactcctgggctcawgcagtcctctckcctcagcctcccaagtagttgggactacaggcactcaccaccgcacctgtctaatttaaaaaaaaaaawwttttttagagacagggcctcactatgctgcacattgcttgacctcctggtctcaagtgatcttcccacctcagcctcccaaagcgctgggattataggtgtgagccaccatgcctggccccgaagttcactttttctaatcagcttactaaaaggtgaaacgagaaaatgtttttcccccttttaaagaaagtatttttatttttactttttattaatgacttacacacttactaggcctgcccttagcaattgccaggctggggcaggagtagaaacggagkyttatgaatttggtatgcaaatatttaaaagtcataagtcatgttaataagctgctaaaaaatatgcattgtctactccagccttgacaaatatgtatattcaaaatgacctagaagactcagtgtaaattttagacagctccaattttgtttcataaataatagtgtagaaaaagctccctacccctggccctagatcatctctatcttcctccccacctgtggctctgtgccacccttcagagtataaaatgacaccttgggactcccagtttaaacaacatatcatagacttgatcaccccacttgtccccactgagtacaacaataagccccagaaataactcaagaggcaacaaaaggagaactctgagaggtggtaagaagaagatgaactggttagagatcccaggactggaggaacaacacagcagccaagcatcttacagctcacacccaacagaggaaggttacccagccccagccccagtatagcaactgaaggtggctcgggtttctgcaggaagtaaaaaagaaagcactaccccagttttgtttgtttgtttgtttgttttttactgcttttctctggtttttctcttaggataatactagcctctgacttgtcatgcatatcaatagtttgttcctctttgtagctccatagagaaacacagtatagatgtaccatggtttaacaattcatccgccgaaggactggctgttttcagcattggagtattaagaataaagttgctatagacattcatatacagrttttagtgtgaacataagttttcmtctctctaggttaaatgccartgaggacaattgctgagtcacacggaaattgcatgtttagttttgtaagaagctgccaacctgtttccagagacgctgtattattttatattctcactggaaatgtatgactgatcctggttctctgcatcctggccaacatttggaacaaactattaatacatacaacaattggaagaatctcatgggagttacactgtgtaggaaaaaawgttaaccctaaaatgttacatactatatgtttctatttatataacattcttgaaatgacaaaaattatagaaatgaagaacagcgtagtggwtgccagtaggacagagggagtgtaggacagaagttgatgaagttgatgtggttataaaagaacacaagaggcygggcgcggtggctcacgcctgtaatcccagcactttgggaggctgaggtggacggatcatgaggtcaggagatcgagaccatcctggctaacacrgtgaaaccccatctctactaaaaatagaaaaaattagcctggtggggtggcaagcacctgtagtcccagctactagggaggctgaggcaggagaatggtgtgaacccaggaggcagagcttgcagtgagctgagatcacaccactgctttccagcctgggcaacagagtgagactctgtctcaaaaaaaaaaaaaagaacataagagatccttttagtgatggggttgttttatacattggctgtggtggtggatacacaaacctacacatgtgataatatttgcatacaaataaacacacacacatcagtaggagtaaaaactagggaaatgtgcataaggttgacsggttgtatcaatgttaatttcaacgtgatactgtactgtcgttttacaaggtgtcaccattgggagaaactgggtaaacagtaacctgggatttttctgtgttatttctcacaactgcatgtgaatctacaattaccccaaaaytgaaagtttaactttaaaaagacacctcagccaacatgttcaagtgctatcggtaccatcacaaatagctgccctggtccatttctcagatctggaggtacacacagcagtgttcagtccaccaacaagaggactagcctgggaaagagaccagttcacaatttacatgcaggcgcagagctgtttgatcagggtattcagtggtccctgacatggtctagacagaagatggggtcacaggctccatgtggacatggcccattgtccccacaggctcctgaccctatagggaaggatatggtgtatggcccaggtctaagtacaagtcaaatatctctacaaggttggcatggaaaacatcacccatccacttttttttcctccagttgccccctctccagtagctacttctttccctttctacgggaggcagaattctaagatgctcaccatgagggttaatatcatgtggcaacttgactggaccatggagttctcagatatttggtcaaatattgttctagrtgtttctgtgagggtgttttgggtgagattaatatttaaattggtagactgagtaaagcagatggccctctctaatgtgggtggcccttatccaatcaggtgaagtccagaataggacaaaaaggctgactctcccctgaacaagagggaattcctcctgcctgcctgacttcgaatttggacatcagcttttcccttcyttcagactcaaactgaaacatcagctcttcctgattcttgagcctgctgggcttcagagtagaactataccgttggctgtcctgggtctccagcttgctgactcaccccgcatatcttagcacctgtcagcctccatcatcacatgagccaattccttataataaataaataaataaataaataaaatcaattggctctgtttttcttgagaaccctgactaatataaccaccaatgacccttgtccttataaaatgccctcccttttgagtgtggatagaaactatgagtatgatatcactcccatgactatgtcacatttatggccaaaggaaaagtattctaggtaggccacatataatcaggtgagccctttgaaagcaaagagttttctctgtctggttgcagaagaggaaatcagagagacctgcttcagctggcctggaagaaagcctgtatgagccacttggcaagtgactatgggtagcttctaggacctgagagcagtccttagctgacagctagcaaaaaaacaaagacctcagtcctagaacttccggtttytcccaacaatctgcatragcgtggaagaggaccccaagcctcagatgagaagcggccctgggtagcagcctggtttcagccatgtgagaacatcagcagagaatccaattaaatagcttagaccttccaaaactgtggaatagtaaatgcatggggtgtttttgttttgtttttcagaaagagtcttatttcacatagacaaggtcatgatttctggatattcttcctcatgytgcagaatacagacttgtcctatttagttgataactcaagttaaaaggacccaggacattttcaaaagacaccactaataagcacaccccttcctccactcttagggtttttttgtttgtttatttgttttgtttttaaagaagaacggccgggcatgatagctcackctcagcattttgggaggctgaygtgggtggatcgcctgaggtcaggagttcaagactagcctggccaacatagtgaaaccccatctgtactaaaaatacaaaaaattggctgggcgtggtggtgggtgcctgtaatcccagctactcgggaggctgagtcaggagaatcgcttgaacccaggaggcgaagggtgcagtgagccaagattgcgccattgcactccagcctgggcaacaagagcgaaactccatctcaaaaaaagaaaaaggcgcgtaytactccattttttggaatggwataaattgaagagaaagaatagaattgcctaaataaatttaaaaaagtaaataaggttataattctacctcatggtataattctacctcattagtggagtgctgcacacactaacccagaataatactgggcaattagattacatgttttattaattgakgtgaaattcacataacataaaattaaccactttaaagtgaacaattcagtgggatttaggacaattcagtggcatttgtgcaaatggtgacttccatacagttctaaaacattttcatcaccctaaacagkcaccttatacccataaagcaactcctcctcattcctcacctccaacccagcccttggcaaccatcggctttccrtatcattttacctattctggscatctcatataaaaggaatcagacaatatatgactttttgtctgtcttctttcacttcgtataatgttttcaaggtttagtacaattgttttcaaggcttatctaygttgtaagatgttatcagtactttgtctcacttttcggctgagtaatgctccatgcatattccaccgtttatccattcatctgaggatgggcatttgggttgcttctgcctttcagctattgtaaatgctactaccataaccatgcctgcacatgtgcttattggaaattttacttcttttgagtrtatacttgcaagtggaatttctgggttttttgataattctgttgaacttttgagaaacaatgacttttttcatagatgttcttttaagctgctaagtttgtgggaatttgctacacaaagttacaagataaattcaacttttttacctaattatttttaaatttaccttcatacctctaaataacatgctctgaggaaaataattgctacttcttgatttgccagaaaaatagtgacaactgtccctatggcaaataagagcttacccctctcatattcctaccaccatcatgccaagtatagccttcccatctcccatcctcccagtactgttaagtcataacattggttactttactatcaggtgcttaccttattaagctttgtaaattcacagttgatccatgtagtaaaatcatgtttacttttcctttcctcagyaacattttgytttcccttccctggagttaatgattcaaagtctagcctttatattgrcttagttttctatacacccactactatttcaatcccaaacattcactaattttttaaatagcctctcaagacttttagacacaccaggtattctatcagatttgacatcctgaggaagttttgcttggagtcttctgatctgttgtgccctggactgattggtttttataccaaattcccagctgatgttctggggcctcccttcagcatcgccctggaatctgtctcctaagctggatctattgtttcatgtagcaaatatattttcttcttacctggcttattcctttaatgttgcaggatatcctccagttgtcagctgtcatcctgggtctcccttcagcatcaccctggaacttgtatcctaagtkggttctattgtttcatgtagcaaacatattttcttcttacctagcttactccttctttgttgcaggatatcctccaacarcttctcaagaaagggcccttaaaggcagatcttttgagaccttgcatgtctaaaatgcattttrtcttcacacttggcttatagtttggctgggtatagaatcctacaatggaaatgattttcccttggaattttctgcactctagtgttattgttgggaaaaccaaagtcacctcaaatcccaatcgtttgtacctgatctgttgttttcctctggaagcccataggatcttctctgtgtctccagtaggctgtaatttcacagggcttggtaagtgcccattttcatccatcacccattatgcttgacattcagtgactcctttcaatttgaaaagtcatgtcctttgtttctgaaaatttgtcttaaaatattttattgataatttcctcccttttggctgacacactacccctccccccaccctgcccaccccatccctcccttgctggctcttattctatctctgtctctcattttttctaaaactcctgttgctctaatatctgaccttgtggattggccttctgattgtctttttctctcttggacatccttggttttctttttaaacaacttgctgagccatagcttcaactttattctcttatctgtatactttgagattttttttgtttccactatcatatttgtaaatttctagagctttttatggtttggatgtttcttttttgtatcatatcccgctcttgttttatggttgcaatattttttcacagctctgaaaacatcaagaatagtttattttcctgaatgttcttctcctcaaataggctgatycctctgagcttcttattttagtatgtttattttttttcctttctctttcatgttagaaattttctttagatgtctggcaaatcttttctgctgatatttaaaagtaggggctaaaaaaactgattgggactgggtgtggtggctcacgcctataattccaatgccttgggaagctgaggcaggattgcttgaggctaaatttaagaccagcctggcaacatagtgggacccccatctttacaaaaaattttaaaattagccgggtgtggtggtgcrtgtctgtggtcccagctcttcaggaggctgaggtgggaggatcacttgagcccaggaaggtcgaggtgagagtgagctgagatggcgccactgcactccagcctgggcaacagagtgagaccctttctcaaacatcaacwagcaaacaaataaaaaactggaagttctgagtgtgtgcttgagggtgtccttgtagggtkactacacagggctgtggagctgaggaaactctcatgtcagtatctttaagtctttcctttggagctgacggaatcgtgagcactgtttcctcctggctgcggcatcatggtggagcacgtgggcaggtggaggtgggtgggccagcgtctcagcatccagtagacaaatgtcccttgaataccccattttcagcatagaccctagacctcagctgagcttgttgtgcttcagcccagagaccctctcttttactmtcactgaagaacaaagccacagacttttgttgggccagggaaggggcagtgattcagctcacagaatgtggaggggacctgggacccactacttcataaataagctctcagccaattcttattttcttacacaaacccctccatcccaagctccatctacagaggtatctgtcaaattccagagcttttcagcttgctgcaaaggaagattgggttggttttcaccactgcctggatttctcgttgccaggtgagaattagctttttttttttttttttttttttttcagatctgctcattatttgcctgtcttccccctgcttttgagctttcaaggttttgctgttgttaacttctctctgattcttccgaagtccttcttgccgtactggtgaggcttcaggaactgactgcaggtgttcaygccaatatctatgcygggaagccsttttactcctctgttctgcaaagctctcagtaaggcatttttgtgttttagggggcggcattcatgtctggctttctgtagtgactggcctgaggatgagccaggctgtactggccaggacacagtcagagctggaagattatcactcctaaccatttcatcttttccttccttgttcatctcccttgagagtttgaaacattctttaaacacaggaaagactggggatttgattgtaagcatacttttttcaactgatttccttaaaaaacacttagaatttacaagaagaacatcattctcccaacagaattaaattactttcattctttttcccgggaragttttgctggaaatgtcctctcctagctctgagctaacacaactctctgttaatgtatttcttaggaatcatccacttcaatgggctgccacttttgtgtatttgtttttctttcttatagataatgagttcctttaaggctagaaactgtgtcttattcatttttaatccttccctcttccccaccattatcatctgaaataaatgaatgaatgaaaagattctgagcaaggtaatgcctggtagcaggatcaggtctaactcctcactcttccacaatgcctcacccacatagacactaacataggcttggtggttggccaaatgaagtgcagaatcttgaacaaagtgataactggagcagcaaagccagagcatggcaacctccttgtatttctgccatgtccatccctgcccattgtarmgctagcaccatggttaagactatagatactaaactcagactctctgggttcaatttttgactccattcattatcaactttgtgaacttgagaagtatgcatattctttctgagcctcagttttcccttcagaaaagtgggaacaacactggtgcttagtagtaggtaaratgcaaattagagcagctcctgacacgcagaaagtgcacagtaaatggtagcactgcagttctccaatgggtaatgaaaagatgactttatttttatcactgatctaatctttatgagccctggtcctgctgggttccagaaaaaaacacgtttttaaacttgggttaatcataccttagactcttccagtccaagcggtcttgtaattataatccagcccctgccgcgtaagtgcttaatctctcagactcctcctccttctgttctcctccaggattgyatctagggagcctggaatgggggcttctgtgagggaggttgggacccacatgttctctgtttacagacttgtctgctttmgcctggtccttkattggtgacagttgatgtgtgtctgatcacaactggccttctggatgtggtgctggctcccagcactggaggctgtggtccctgccctgtgcctccagctgagaagtcctcactttccatggcttctgtcccaactccaggctactgctggtcaacaagtcctttcagcrtctycattcccctcccttgaccatatgggaacttctggatccctgcctgccgtggacaggaggcttgtttcaggcctacctctcaagctcctctgtctgcaaaaatgcatttataaaaggataaaggaggacccgcagaatcatcaggagcactcagcttccaggaataagatccagaacctcagaaccggcttgacgaggaaatagaagctgctaccaacgctcctgcccctgttctgccaatgctyctctggggcaggaactcatcctgcagctactagtaaaccatgatccccatggaagctggtctctgccaccattcatgccaacagacctgcctcctgcaggtaatccatgccatccaattgcacacttctgagctggagtcttgcttgcctgggtttgatctgatgagtgcatgtggcaggcctgcatcctacctaccagggaggctgggctttgagttttctgtgttctggctttggatggtgtgactattgaggctggaaatttgcaaaatacagcaaaggcattcaaaagggtctgcaagccgtgtgcagtggcatacgcctgtagtcccagctactcaggaggctgacmcggaaggatcttttgagcccaggagtttgagtccagcctgggaaacatagcatagaccttgtttcttwaaaaaaaaaawawtrataacaataaaaagaactggacagctagaaaacatgatgctacatgaagcaaaaacccttttttcattttattatgaaaattttcaaacatagagcaaagttaaaagaatttamtagtgaacaccatatgcccctcacctaggattctaccattaacattttactatgcttattttatcactcttccatccatcctttcgtccatccacacatccatccaaccagaaatttttggtgcatttcaaagtcaattgcagacattggtacacttccttctgaatacttcagcatgcctatggttaactagagtttgaaatttgtttacagtttttttcttggtgttaaattcacatataatgagatgtacaaatctaaagtgtacatttgctgcattttaataaatgcctatgtaatcaatattccaatcaaaatatagaaaaaatgatcactccagaaactcccctcatgcccctttccaatctctgtctctaaccacccccaaaggcaaccactgttctgatgtttttcctaccataggttggttggcaaaagccctctaattttggcttttycctgaaactatggaaatttgccccagaaagctgaaatcagatagaaaatctgcctgcttctccttccttggtctcacttctcttycccatactcaacacaggtgggctcccctcagtgccctggtagaaaggatttccctgaaatggtgtatccaggccaggtacagtggttcatgcctgtaatcccaacaaatggggagaccaaggcaggaggaccacttgaggccaagagtttgagacaagcctgggcaacacagtgcgagaccctgcctccacaaaacataaaataaagtaaaaattagccagacatagtggcacatgcctgtactcccagctactcrgaaggctggggtgggagaatcacttgagcccaggagatccaggctacaatgagctatgattcattaagcctggatcctgatarttaatggaaacttaaagagtttactaaacgctttcttggcaaagcctagctttaaaaacaacattgtcttatgaaggacaaaacaaaacaaaacagaaaccaaaaaacctgatagggcagtcagtgctagatgatgacccattataattagtctcctctgccctgtcccggaagcacagagactcttggcttcagtgggtggggaacctcaggtcaacataatttaccagaaatatgactgaaaatatttcaaaaacactatcctcatcacagagtgagtgagccgaactgaaccaaggggaggatctagaatcagatgacatcgagaagttgatagcaaaagtgttagaaccrctgacatctcaataggttccacagtgattctccctttaatgagcatgaagaagtatttgctgaatgagttttgacaggaattaatgaatgcagaatggaagaaatgaatgaagaggggatcataagtgaggtgattcctgagcatccaaagcagtgacacagtgagatctgaagtctttgcagcttcagagccgctcgtaggtgctaacaatgtgtgatgtatggaaagacagacgaggccacaataggacacaggtgacagggatgaggccacctcttacctccaggcttgccacacagctctggcccacataaggtgggcaaggacaaggtctgctgatgacagtactagagcatcttgccttccaactgggtgagcacctccctgcaagagcatgaacgccagctgcctatcacctatgtcaccggctacaggcatggtcctaaggatgaggtgatgtagaggtgagttagagcttcacagtcttttattagttgccygatgactttgcccaagggtgagagggagcagtatcatcttccattttayagccaggtaaacagaggcccagagaggggaagggacaccctgctgcccgaccagtccaggtctagctgtgrtaggttgttctaactcattgtcttgtgaggatgaattcccaaaacaacacaggtgactcccagccagagtgcacaggggatcctgtgtccagctggttgcttggcccttggaactcacccatgggcggtaccaggtctgtggttgctggacccacggggctctggatatgggggttccaagcagcagagrggcctggggtgccacccacagggcacagctgctctggatttttctggccctcagcctcatctttacttgagtccacagcctcaggctccctcccctgtgatttgggtcagtctgaagttttctcttaagggacagacctggaatcctagargggaagtgcactctaggccagcagttctcaatcttttggggctcaagacccctttacacttttwaaaattattgagatgccaaagagcacttgcttatgtgggttatatctatagtttttttttactgatttggaagctaacaatgagaaacttacaaaaatgtatgcattaattcacttagaaactaaaaaacctattgcatcttaacacatacaacatgtatttatgaaaaataactgtactttccaagaacaaaaatarcattagtatgagtggcattgttttagatataaatttttttttgcaaatttctttaactaaatggcaggcttaayagagaacagctggattctcatagctgcttttgtattcaattttttaaacattatatatcatgaagcytctggaaaattccactgtacattcagggctagggagatgctttgagtcctgaaaaaaatcatggtgcccttccaatccatataattaaaacaaaagtaaacttgaaattaagtaaacacaacacagtttttattttcccaaggtgagtcctttgattttttttttttaatrttaaaatattttttaaaattcaggcyaggcacggtggctcaagcctgttatcccagcactttgggcagatcacttgaggccaggagtttgagaccaacctggccaacagagcgaaacctcgtctctactaaaaatacaaaaaattagctggacgtggtggtgcacrcctgtaatcccagctactcaggaggctgaggcaggagaatcaaactgcttgaacccaggaggcagaggttgcagtgagccaagatcacaccactgcactccagcctgggagaaaacaagaccctgcctcaaaaaaaaaaaaaaaactgcttggtatccacactttactggtgtcttaagcatgtgaacaactcatcacagatcaaaggggaggggccctgcccaggcatctgtgcttggctccctggagaaagcctctcttccatcctcactccccatcaagagacccttatttctctgaactcctccccaaaggacagggtgctttagcacgacctcctcttcaytrgatttagggcatggtgctggggagcagatgggaggacagagagacctgaatccctcaagacatcctcatcaaggaggctgtggtgggaaggaaacaagccactgcagtgtgaggctcgtggacggacagacagagggacagatgatggacatgcccaggagctccaagcagtcaagacccctggagactatggcaatcaggcttcctggaaggacgtggagctggaattcagtttttaggacgggaaaaaggggcaaaatgaatgagaaatttttattctttcccctgactttaaagataatacagatttgtatagaaaagtaaagcaatacagaaaataaaaagaagaaagtaaaaataattacaactaatatttgttgggtgtgtgccaggcagtgttctaagtgctttacatatattcacatttaatttttacaacaaccctttgaggtaggcactacttttatccccacattacacataagaaaactgaggcctagaaaggttaacttatttgccaatagagaactaagtgatgaagctgaaatttgactraggcagtttgactccagagccaagatctgaggcaaccatctaaacacaggtaacccatctaaacattcatacattgagcatctactacatgccaggaacctactaaactttagattcatgactctgactgttggctgtggtctcctacttgagcacataggatagaagaacatgatttcyrgaagtagcttgttcagcatcttcatgccatggtggacttgggggtattctgggggggtgctgctgagcctgtgtgaggccaagtattcatgaagagcaacaaagagacttgggataaattaagatggtactgctggccaagcgtggtggctcctgcctgtaatcctagcactttgggaggccaaggtggkcagatcactttaggtcaggagttcgagaccagcctggccaacatggtgaaaccccatctctactaaaaatacaaaaactagctgggcatggtggcacgtgcctgtaatcccagctacccgggaggctgaggcaggagaatcgtttgaaccrgggagacagaggttgcagtgagtcgagatcgcaccaccgcactccagcctggggaacaagagtgaaacaccatctcaaaaaaaaaaaaaaatgtattgcaaaaggcattggaggccaccataaagagtttgaacttaggaccttgttgggagtgagaagccacagggcctttggaatgaggagtgccacagaataaaaatggtggtttgaggatacgtatgtrtctagagggaaatttggcaaaatatatcataattttgcttgtttatttgtttttagagacagagtcttgctacgttgcccaggctggacccaaactgggctcgctgtatcttyccacctcagcctcccaagtagctgggactacaggtgcacaccaccatgcctggcttgttattttaaataataataataataatgyttttgaaaggtagtatatacccacagtcaaacatttctaagagttcaaaaattaggtttctccctgacttctcgtttctaccacctccttttattttccaccttactttttgtttttaattaggcaatgtayctaggagactgtttcatatccacgtgcatcagtctgcctccactttttaaatagctacatagtattttattacatggatagatcataatttatcccattaatgaagacaggagagttttcactctttctgttataattaatgttgcaataaatatcctcgtacttaaatctttccacrcttttggatccatctgtcggacaaattcctgcacatggaattgctgtcttgaagaatggctcctctcaacaatttcacttggcagaaattgtcccatcatagaagcacacaaaaatacatgcaaacaattaaatttctttataagggcaaaaaagtggaaatgacctaaattcttataaatttaagaagggttagtaaaattatgtaaattcacacaagagatgacattaataatgacagtgcatagctatattctatgatttgaaaagctgtcatctcagcactttgggaggccaaggcgggtggatcacgaggtcaggagattgagaccakcctggccatggtgaaacyccatctctactaaaagtaaattwaaaaaaaaaattagctgagcatggtggcgggtgcctgtagtcccagctacttgggaggctgaagcagaagcaaggtgagaacccgggaggtggagcttgcagtgagctgagatcgagccactgcactccagcctgggcaacagaacaagactccgtctcaaaaaaagaaaagaaaagagagcaccatgtttggtcaagcaaaaaggacgggttacaaaacagcttctgtgtatgatgcgattcatgtaaatttgttgccatgtgtatacagccgtatgcatgtatactttcttcactccctgtattgcttgaattttgtacctgagtatgtattatctctatagccagaagaacaattaaattgcttttaaagcatctgattattccccaggcacagattttaatttgtgaagcacccactttatgcctggcattggggtaccctgagccgcccaaggctttggctcccgtctgtcatctctagcctgatcatcagaatcagagaatgttggaactggtaacacttagttcacacccgtattttacagatgaaggcaataaggcccagagaaggtaagtgacctgctgaaggtcacacagccagtttggcccagagataacagaacccaggactctactgccaggctatgatgctcacttctaaactgagtatgggccgggtgcagtggctctcacttgkaatctcgcactttgggaggctgaggtgggcagatcacctgaggtcaggagtttgagaccagcctggccaacatggcgaaactgtctctacttaaaatacacaaaaaattagccgggcatggtggcacacgcctgtagtcccagctactcaggaggctgaggcaggagaattgcttgaacccgggaagtagaggttgcaccgagctgagatcgtgccgctgcacttcaccctaggtgacagagcgagaccctgtctcaaaaaaaaaaaacgaggagtatgaattattatttggggtctcgagcagtggggcaggcagtgattttgatgccctgtcttctgggagctcccgtccaagcaagcccaggatgaaagataaaagggccctgaataagaccatcattagtggggaggagcctgaccctgcataggcagaaaagcagcttcagcagggcccagggtctacagggcagcagcctgcagggtgttgaggaaggagctgccctgggctgctgccagatgtcagtaattataaggctatgtgggtctgcagacagctcattaaagacgcttgatctgcgtgaaaccaggaagcagaactcagcctctttgccactttctgtaagaaatccaaccacatcaaacactttggggtttttatgcagtttcctgaatgttggggtgatcccagggagcggcctcatcctactgtgctcagcacacggttgtctccttacccttccttgtctctttccctcgattctaccccctcccacttccccttcctcactggcccaggccacatccagccttcgatagccccaagtcatccatcaaagcatttctccggcaaaaagaaacctaccccaccggcttccatgaaaataaaatcccctctatttcattaacaaaagacctcagatgccttgaattccagcaccttcaagcccagaatcttagactttgagctggaatggccctgaagaataattgagtccaatccctttagtttgtaggtagaaacaccagggttccaggaggggagaggtcttgtccaaggtcacgggacacccatggccaccaggcctctaagctcctggctggaggccactcacaaagtcagggcagatgggcctagcttmtgagtcagaaccagctctcccctttttcttayctacctcctctcaagagtctagtgtccaccaaggaagtctagtggccctgaaggaggatcatggacctctgcctctttagatgcctgcagaacagagtggagctgtgggcccaggagtcttctgctctcacccaggaggggagagggagccacagactgacccggcactgcagcgtgcaaccatgtacttcggggtcctggcgctgagcctgttttttctcatttgagggttgttgtgagggctaagaatggccaaccataaatccgagttccctcagtcttctctctttccccgttctttttcttgccaggcttgtgacctttctgagcctcagtttctccacagtcccattcgcaactccgtgtttccaaggtctcttggcaggagccactcccacagtgaacccctctaggtgcaattacaggatgattttgtgtctcgtgggtgtcgctgctagggtggagggccacgcctcctcttttgaattctgactttcctgcctaggagtgtcccaaggttttccttgttaaaattggtctggctggctgctgtgacgcgccacactgtcctgacggtgcacacactgctgtgtggaggaacagaggagtccagctggccttcacatggcaggtaagtgggcagagcctggggccttgggacaccagggctcatgaggggggcttcaagaaacaygggtctgtgggatgacgtttgatcatcgattgttaggattttacagctggatagtccaccatgaacacatgaactcttcgtgtggattcatgaggcccaggatgaaaaagccagctttaagccacccagcaaggccatggcccaggctggctcaggcgctgtctcctgggctggggccaggtctcacccctgtgcctcggaggactgaaggaggcaggcacaggaaggcaggggcagaaraaagaaaatctccttgcaccccatgcacattccatggatccagagacgtttctgggcatagttgggaattgtggcctgcgtgggaaggagtgagaggcccccayyggctgcatcctcgcctgattcccaccccaagcacttgagggcaagagcagctctggctcaagtgaaaacagctatatgaccttgagcaagaaaatttgcccttggtacctctgttttctgatctgtgtaatggggattataatgcaaattatctcacagccttgctgtgaggagttggtgagaccacgtgtgctgttctcccaccacacatctcaagtggggacttgtaaacagtagactcagaaaatgtgggtcgggcacagtggctcacgcctctaatcccagcattttgggaggctgaagggggtggaattcttgagctcaggagtttgagaccagcctgggcaatgtggcaaaaccccgtctctacaaaaaaatacaacaattagctaggcatggtggggaacacccaaagtcccagctacttgggaggctgaggtgagaggatcgcttgagcttaggaggtagaggctacagtgagccaagatggtgccactgcactgcaggctgggcaacagagtgagaccctgtctcaaaaaaaaaagaaagwaagataatgtgtcccccacgacctcaatatagtgagcagcaaactccctctgcaagaacttgtctgttagatgctggggcccggtaatgagcaagtcagcagaaccaggggtcctacactcacaggtattcaaggggtgtttctgagtctgtgtctgccagttttaattgttcagcattatgtgacagttttatgaatcaaatatttttttaactttcaaaggcagatatttgaatttcctcatcatagtctagcttcctcttcatatttcctcctggcagttaacagcattgctggacgtgttgggcccttcaggctcctaggataggtctgttctgaagaccaggccttgccaacaccagctcacagcccagactgcctgtktccagagctggggttgcctccctgatggccctggtgcagaggggattgcctttgttcctccaagatctgcttctcaaagttcacctagatgatccctcttccctgggcctttgataacctatcagacttaaacttgacagtgcgaaggttagtttctgaggaaggaaaaaagttgatgatgatgcccattgtcaggtctgtaactaacttgctgggttcctctctctgaagctctgtttctccgtctgtgaaatgtcagcattggagttgtcatgcctatgtaaatggactatgtgttggattggattcaattcctgggtcttctgggtcctcttggcttcttgggaggatctgttcctcagagcagtaggtcctgcctaccacacactctgtgcctgaatgactgagacatcagatcctagatggaaagtgtattcatcttcctggagctccttctatcccccctccctcactccatccatggtggacatccctagttgaccccagagctcttccctctggagcctggatgtggccccagaatgctcaacccagctctttaagtaccagttgatcagtgttggcaaaggaggtgagacccttttgccatgattaaattacaatcatctttcagctcagagattccaagaattgagtggaatactgtatgtgaggctggctctggctgggacattgggttggagttgatgagtcactgcctcctggtgaaagagaggccagcagcttccaacaagaccaggaaggaaagagagatggggcagtggccccagaaaggccccaggcaactctcgataaatcatttagtcatggagttcaggtgctcatgatgcgtactaagcataggattataatggggcccattaaaaaccaattatgcttagtccagagtctggaagatgccactggcttcaacagagtttccagggctcaagcccactggcctgagacaaagaattggggaggattgtatcattcagctctctggtatcacccaagggcaggaggaggaagatggatgagctaggcttgggggtggggatgggtggagagctaagtcggcaggaggcaatgttctgcacatggacccttccctttcttaggtggagctctggggccagctggtgagcaaattagttggggaggaggtcagagggccagaagtgatgggcagggcctgactgtcaaggaccttcaatgccaacaagatggctgtagattccatggtgcttgagcagggaaaatgacatgctgacactcagaaaagtcccttctcctctctgaacctcagtttctccatagtgatgggatggattgaacaggttgagctgaaaaacactctgaagctgttggggccatacagtcgcttaagcgagaagcaaagaggggagaataacaagaaacccygtgcatgtaggaattggggaggggaggaccaaagtgatgggggagatgtgggaaaggagtgatgatgtaaaaatccctgtttgtaggccgggcgcggtggctcactcctgtcatcatagcactttgcgaggccaaggtgagcggatcatgaggtcaggagatcgagaccatcctggctaacacggtgaaaccccatctctactaaaaatacagaaaattagccgggcatggtggtggacacctgtagtcccagcttctcgggagcctgaggcaggagaatggcatgaacccgggaggcggagcttgcagtgagcagaaattgtgccactgcactccagcctgggcgacagagtgagactccgtctcaaaaaaaaaaaaaaaaaaaaatccctgttcgtagagctcatcactgtggacccagcaccaggctacgtacctgatgaatagggagacgttgatcctggtggaagcccattgccctagcgtgtttattaatggcttctcctttcactctcagaatttcctgctttaagtggtgcattttatcactaccctatgtataattactaccccatttaatcctcctcgaaaccctagacgaaagatattattattgccactttccagagaaggaaatcggatcctcagatccagggccacacagccaacaagtagatgattcaggatgtcatgaattggcagagcacaggaatggcagctaggaggtcttgtgtaaatagtaatgatgataccactcacatttcctgagaacctagtatgtgcctggtaccagtctaaatactctatgtgaattatttcacttaatcctcccaacgtgaggaagcgggtatgatcatcaccctcattgtcaccaggagactgagtttcagagctcactcacttgccacacagccaacgaggggcaaagcctgcatgtgagctcaagtgtgtgcctctgaaatcaggcttctagttgctgtgcagagtgaaaggaagcgctgagaagacgatgagagggagaaggggaggagagcagacaagctggaggggctatgaggcttggggtaacaggcaggtggagggagcactcttaccacatcctttccctgtgcctggggggtacagcctcagccctggggttggcgagcctttagccttgggctgggagctcatcctgcataccccaagggtgaaggcccccagagctgaaaacaggctgccagttctgtcctcagggccttgggttcactgtcaactggagcagtcttagagcagatgctgcctctcccatcccctccattgggcagtgggtgagctacctctcagaggtacggcaagctgggaccatratcacgtattcaccaagaattcggccaagggaatttgtgcctgggcaggaagttgtgagggagatggtctctgagatttgaggataatgatgataatggcagttctgactcatcccacctcctcttgcccgtctgtgttaaggatgcagatgcctcagagggtgatgggagctgctttgggctgtggcagggaagagggacaaccagtgcaggaaaaccatgtcctagaggctatgtgacaatcttcacatcagcactctctcggctggggaggggggaggtgttgaggtgggggttgtcttgtagggaggagggctgagaggagtccttgggggtaatcagaagcacttgcttcagcaaaccacagactatccaaaccatcagattccttctgggtcattttacagagaagaaaacagacccagagaggcagtgggtgggagtgggtggtcagtggccagtctgcctgcccatgtcagaggcctcacacaccctcctctttctcactctgtggaaggaaagaagttaagaaggaaaggcaggctttggaatgtgacagcttgagagagggattatggggtgggtggggtgtggacagtcggagcgtgagcagctgacagggtgtgggtgctgatcctcgagggcgggcccaaggacgctgcagagcatcagctccccattccgtaccccagccaagggatggggaaggagattcattcattcatccaaccaacattcactgagcacctaatatgccctgggcccttaaccaggttctagcaacccagggagggggagactcagccttcgccttcatggagctctcagtccagtgagggagagacgtatgtaagcaaacaactataacacagcatccctgatcacagataagggacagaagcctccgtcttaaaagaatttgagctgagcacatggaaggggtgatactgggtttattttgacaaggggcctggaaaccatcccaagtgcacatctatctcctcgccttgggctgccgtatacctaggagcctctccccatgcccgtcagtctcactgtccccatgaggactaagagggacactggctaggacagaacgtatctgaaatcaccggtagttccccctgcagaatcctggacccyarccccggctattacaccacatatggcaggtcatggaggtgtgatgctgatggatgtggatgacttagatcaccaaagcagcagctccagggacagattccacagggatcagaacagtgacctcctgggttatggggtgagtgtagagttgggcaggggaggtgccgggggctggcagattgggatttctaggtggtttctgcaaaaccccatcaaggagcaaaagaagaaktgtgttctatggggttaatggggagcaaaatagggacaaatggggagaagytgcaagaagaaagagcttggctcagcagaaggaagggctttctaacaytgggcggtgagtgagctacctctcagaggtatggcaagctgggaccatgatcaagtatccaccaagaattcggccaagggaatttgtgcctgggcaggaagttgtgagagaggtggtctctgagattccaggacaatgatgataatggcagttctgactcatcccaccacctcctcttgcccgtctgtgataaggatgcagatgcctcagagggtgctgggagctgctttgggctgtggcagggaaggggggaaaccagtgcaggatccatggagcttgaacccatgacccagggtccagcagccctcatccaatcccaaactccccttgtatccagccctggggcataccagggctgagataattaccatccagcaacctcgtcgtctgcttctgactcatccactgaaaaaatagcatcctgttctggcctgtccctacatacattgcttgggaagtagcaacatgaattgtgggctacaaatccagtgtgtcctcaggcaagaagtccctttcttcccatttctgggtctcagcttatatgtcagtaaatggagacctgagctcctaatggctcttccagctctgctgatattagacttgacaattctatgtacaaggtacctggttgcgggagagggtcctgcttgtgttttctgactaaaccaaggtcatctgagctcaaagttttggagtttcagaggtttgtgcctgccctagaatgactggggctaacttgatgtgaaagatttggttttactttctgttgtgagaattggcaagggtaatggaaaagccccctggaactgttgttccagctcgtgccacatggggtcactgttgaacactggtcctgcasagtgctcactcaccacagcaggggctgtaggagctcccaatcttgggacacatgtgtcagctatgtgagttcctacccacatgttcagtcattatccccatatcatgatgccagcaggggcttctggcctaggctaagctaaaactagtattttccatgaatctcaagcctgattattgagaccacagcaccagcccagacagctcacaggtggagagcagttgggaggttgttgtggtctagacaagaatcttggctctctccatgtttcagttttcaattcctgtgtagcaaactgccccagcacttaggggcttcagacaacaatcattctcctgcttaggaacctgcaatttgggcagagctcggcagggacagcttgcgtctgcatcagctggggcagattgcctgggggctgaaggacccacttgccagatggctcagtcccatggcttccarataattctgtctgtcagctgggagctcagtgggctgtgggttggaagccttggttcgtctccaggtgagmttctccgtgggccatttgggtttcttcatggcatggtggctgggttctaagagcaagcaacccaagggaaccagaaagaagctgtattaacttttataatctagccttagaagtcacaatgtgtcactctgtcttagccacaagtcttccaggtccagagggtgggaatatatgctttacttctgcaatgagaggagtatcaacatcatattgaaagaagagtatgtgggatgggagatattattgcaaccacctttggaaaatcaatctgccacatgctgttaactaaaagattttacaaagatgctggaatctttaaaaagccaaacattttgaccagccctgtccagacacttgcccacacaagccactgatctgatgcctgtggtgaagctcacgttgaattttacagtctgtaacttctaggctgtgactcctatggggtcaaagataaaggcaccatagcctggggatagacaagccaccaactcaggaggcagattcccagctccatcacttagaaggctgtgtaactctgggtcatgtgcagtggcttatgcctgtaatcccagcactttgtgaagctgagatgggaggattgcttgaggccaggagttggagaccagcctggtcaacatagcaagaccctatctcaaattaaaaacaaacaaacaaamaaaaaaaaaacaggctgtgtaactctgtacctcagttttatcatctgtgacattgagttaacagyagtacctccctcatatggtttattaagattaaatgagctaatatttataaaatatttggaaaagcacttggttcataggaagatttattaaataaaacctatccaatggtctagccaacaattactgacatttcctgtatgcttggcatcaaataagatacarccaagagttgcatgacaagtgtcctttggtggggagtacctggtgatgtaacttcagtggttctcaactgtggcagattatatttcacagggtggtcatatcagtatacatctcagctcaatattctttttacaatgggacatgacgttggtacattttcagcaagagatggggcatgttccttctctttgaacctacataggcctttgtaactgccttgacccataggataaggcggaggtgacattgtgtaacttctgaggttaggtcataaaaagcattgcatcttccaccatggtctctcaggtcacttgctcaggggaaactaagcaccatgccaggaggacacccaagcattcccatggaaagatccacatggaaaggaaccaaggtgcctcaacctgtattcagcaccagtttgccagccatgtaagttagtcacctttaaagtggatcctccagcctcagtcaagccttcagatgaacatggccccagctaacatatgattgcaaccccataagaaactccaattaagagctggccagtggagctctgcccaaattcctgacccacaaaaaccatgaaagataacatatgattatcatttttccaagctaaactctgggttaaacagattggttaagaagcaatagatgagtaaaacatcaacttttttgtccgtaataccctccctctcaatataacaagtatttaatagtgtcccttcaccaacctgaaawtgaattgacacatcttacctacctctatactccactttttaaaaaattgtatcctaactataatataaatagtaaataagaggaaatcaatttttcactaaacatagttaagtatgtaaatgcttattgaaactttaccagaagacatgatgaagtgatcagatgccatcctgcgactgtagtgaatcaagacaaaaacaaggccactccataatcatgagtgaacacagacaaaaacatgaacattgtctaagccacttactggtctcgatctactgacatattagccctatagrtgggctaatatgaataacggctgcttctttactacttatgacactagcctcaattcattcttcccatcttctacgtaaggactattaagatactcagacatagacttgcctcattcccagagaagcctccaatcccaagcaaagccctgcttctttgaactctccccaaaccacctaacacaagccgcaatcctgtaagtcctctctaatattgtcttcccgagatgttccgtgattctttgtggtgagcattctttctcattgccgtgagcgatgagcccttcctgttcattgtactgatgtgttcctggtggtctttgggtagagagccttgacagaaaaagaaaataaatttcagtattcatcattcataatacggggaaatagtaatgaaacttttgtttcagtttatatctgtgcatgtatrtatgttcgcaggcatatggagtatggaacatttaaaactgtttcttatgttaatcacaataaaactagtataaccactgacccagtggtcaacagctggaagccaggatgcccacagactccactccagcccttgcttgtttgtgtgccctttggcaagttatttcacttctctttccctcagtttcctcattcattcattaatatatttaagaaatatttgttgagcaccttccatgtatcaggcgctgaagattcactaatgaacaaaacagacacagctccctgcccttatgcagttgatattcttgaaagggaaggtaggcaattaaaataaagaaataaaatatattgtaagatgtcagtaagtgccatggaggaaaatagtggagaaggagagtaggggtgatttgcaatttataaaggagtggtcagtgaaggtcccactgaaaaggtgacatttgagcaaagacttgaagaaggaggcaagggagcaggttctgcaggaatctgaaaggagagtgatccacatacagggaacagcaggtgcaaaggccctgaagagggagcctgtctgcagattcaaagagaaataaggagatcagtgtggcttaaagggatgagagaggggaagagaaactgaaggcccaaaaaagatatcaaagtgctcaatcttgaagggcttgtgggtcattgtcgggacttcaactctgctgagagagacaggaaccaatggagagcttgagaacaacgagtgatcttagattttaacaggatccttctggcttccatgttgagaatgagccctgaggatatgygggggtgggggcacaggggaagtgaaatagggaacccagtgagcatgacagcatctagaaaatgaaaggggccatagtacctcccttaggtgtatgttaggaggcataagcacttgaatacatacaaagattttattattgttgtttgtgttatcccaaatctaatagctgattggacaaaggagagatgaactctggtggcagggccgaggcaggaacatctcagaagacaatcacaggcaccccaaccaggaggggccttaggaaaagcacaaggcaggaaagagatatgtgcgacgtcggggcaggaggttgtggaggtagagtctgatgcagccagtgcaaagagtaactgagctgtgagggggtggggggtgagctggaggagtggaaagcaatgggatcctgcctagttccttgtccaagatgaaggagcttggacagatcataagagacaatggggcatccagtggagatttgggagcagatgtttgacaagatgaagcagcagtttcttggaacatccctttgcttactaaagcatctcaccagatatctaatcaatcttccacatggcaccagaatgatctttccaaggtgcaaatctgattacatcacagctttgcttaaaacaatatttggctgactacggcccttaggataaaaggcagactcttcatcccactccaagcattggtggtctgccgactatgggcccctccaacctcattgccttccccacacatctgctttctctcaaattttagaagtcaccatgcttcctcctgtctctctgcctagcgccatagctgctggctagaattcaaggctgcacacatcctggtgttttaagctgttgcttatagtactctggcaaatagttttgctaatctaactacttgagtttaggtgttctctgctcctgggactcccaatgcctctcccttagggttcatctcaaagcttgacccaaaaggtttgaggtctatctgcttaatgccagtcttctccactgggctatcaactgcatgatgtcagggccagtgcgtatttgatggactgttgggtctgtagcatccagcacaatgcccagcacgtgaatgaatgaaccctgaataggggaagaggatgcttgggctgagactagatccaacactcaactctttcctggagacactcatccaatttaagactcagcctcagttccgccttctggaggaagccttgcttgtgccccttcagactaggccaagccctctgttagtgttctttcagctcccatccttctccctgatagcatgtatcaaagcaagaattagttatgtggactcacctacttaggtgtcacccctggaacataataagtaacgatgattgagctctcatgttacgaggactctaaatgacaggggccattatcctcacaatcacgccacaggcattattcccattctgcagagcggggaactgagakgcagagaggtcaagaaggcgggccaggaacagtggtcacgcctgtaatcccagcactttgggaggccaaggcggacagattgcttgagctcaggagtttggggcaacatggcgaaacctggtctctaccaaaaatacaaaaaattagctgagtatggtggcatgtgcctgcagacccagctacttgggaggctgaaatgagaggatcacttgagcctgggaggcagagattgcagtgakccgagattgcgccactgcactccagcctgggtgacagagagacactctgtttcagaaaaaggaaggtgcttcagccagtagatggccaggttagaatctgaatccatgtcagctgcccccagaggacctcctcataaccattgagccatacagtctcaccgcaccatgcattgagggcaagcccacatctatatactcagcaccagacaccagcctggcatagagattatacagtccatcctcaacacttgtggattctgtatatgcacgttgctaatatttatttttaaagccaaaatctatactctgcactttcttggccrttcacagacatgcacagagtgcggaaaaattgtcacctgacctgacatgcatattcccagctgaagctgaacaggcaatattctgcctcttcatttcagctgtcatactataaacaaataacctttctctgttcatttaaaactagggttttttttgcatttttgtgctttttttgttggtgatttctytgtttaaaatggccgctgagcataggactgaagtgctgtctcatgttcctaggagcaggaaagctgcgacacgccttacactaaaaatatgtgttaggtgaacattcaggcatgaactatagcgctgctggccacaagttcaatattaatgaatcawcaatatatattaaattatgtttgtttgttttgagagggagagtctcgctctgtggcccaggctagagtgcagtggtgcaatctgagctcacggcaacttccacctcccgggttcaagcgattctcctgcttgagtggctgggattacaggcacccgccaccacgcctggctcattttttgtattatagtagagatgaggtttcaccatgttggccccagggtggtctcgagctcctgagcttaggcaatccgcccacctcggcctcccaaagtgctaggattccaggcgcgagccaccacgcccatcctaataatgtatctttaaacagaaacgcacatataataaggttatatactgatcaactgatgaataagttgggaccagaggctcacaggaacctaaacctgtatttattttccctaagggcaatgggccagttctcattaattcaacctttgcagtgattttacagaacttaatgaccaagaggctgggcaaggtgcctcacacctgtaatcccagcactgtgggaggccaaggcaggcagatcacctgaggtcaggagttcgagaccagtttgaccaacatggcaaaaccccatctctccaaaaatatacaaagaaattacccaggtgtggtgatgtgcacctgctagttccagctactcgggaggctgaggcacaagaattgcttgaacctgggaggcagaggttgcggtgaattgagatcacgccactgcacgccagcctgggtgatagagtgagaccctgtctcaaaacaaacaaacaaacaaacaaacagagaatcgccggtatatgataaatagcagctggatgaacaaatgactggccgagaatgaatgggaggacaagctcagagtgggtgagaaacaggaggccgtggcctcatctccctgtcctctccccacccagggatcagagtcaccaaggtggactggcagcggtcgaggaatggcgctgcccaccacacccaggagtacccctgccctgagctggtggttcgcaggggccagtcgttcagcctcacgctggagctgagcagagccctggactgtgaggagatcctcatcttcacgrtggagacaggtaactgggcttgccagcaccctcttctcgtctgcagctggagggacctgtcttatgactcagtaacataagaccttgcagtcagcagctcaggctctgggggaagcaagtcactgtaggtagacggagccttgaaccctggaggcttctggtggcagctttctgggggtggttgggaggtgctgccagcagacagtgggatggatgggatgacctctctggaaccctgtgtgtaccagacacccagggctctggaagggtatgaaaacccgtcaagcactttgaagcccaagcttttctttcctttcctggcccgacataggcagactttggtttcaaaggatgctgtcactttctccttggcctggaagtggctgggatgtcagggcagctgaggtggaccctcacttggccactggccttcttgctctttgtcaggtccttctcccaaagcctcccagaagttcagggggtgaaggtggggcttccaggcctgtagcttttttcacttctctaaagctgggtttcccaggggaagggtctcctgattccctctcctctcctccaggaccccgggcttctgaggccctccacaccaaagctgtgttccagacatcggagctggagcggggtgagggctggacagcagcaagggaggctcagatggagaaaactctgaccgtcagtctcgccagccctcccagtgctgtcattggccgctacctgctgagcatcaggctttcctctcaccgcaaacacagcaaccggaggctgggcgagtttgttctccttttcaacccatggtgtgcaggtaggagtggccaagtccaatgcagaggtttttccaaaagacatccttagaggagagcctgcccttggagggggcctgggaggtgggttaaaggacaagaagctgaatgccaagagctgggcaagaacttagcctaggcagaggtaggcaatggtcagagaaacctggtagcaggtgcttcaaagcctatgccagaggacccagtgggcaagagaggcccaggggtgggtaagagccaggacttgggaatcagactgccttggtttagtcccagctgtgctgagctgctctcctctaccagtctccatttcctcatctgtaatatgggaaaaataacagtgcctacctcttatgactatggtgaacacccatagggctaatacttgtaatgtatgagatacatcataaggccttagtaaggggtggccaggatcagtattattattaatatttaagaaatatggccgggtgcagtggctcacgcctgtaaccccagcactttgggatgccaaggcagggggatcacctgaggtggggagttcaagaccagcctgaccaacatggagaaatcccgtctctactaaaaatacaaaattagccagctgtggtggcacacgcctgtaatcccagctactcgggaggctgaggtaggagaatcacttgaacccaggaggtggaggttgcagtgagccaagattgcgccattgtactccagcctgggcaacaagagcaaaactctatctcaaaaaaaaaaaaaaagaaaagaaaataagaaaaaaagaaggaaatatgagaaatatgaggctactactgacatcaaggaggcccacccaaagcwgtcagttcccataaaactcttttgggattggtccctgcttggwtaaagacttgccaggagggatggagtttggcagggaggcagcacgggagctcgcaagccccctcttgacctctcctgccccagtcagcctccgggcgctgccctgctgctgatccctgatgcagccccttccccaggccagcaaggccagagccccagtccacaccgggcctgatgactgcttttcagaggacgatgtgtttctggcctcagaggaggagagacaggagtacgtgctcagcgacagcggcatcatcttccgaggcgtggagaagcacatacgagcccagggctggaactacgggcaggtctccaggggcacaggccagacaaggatgtgggctggggcatggggaggtcggtgggactggagtccctctgtctgctcactcttctcaggagggacaaggggggctcactcctagagaaaacccactcattcattcattcatctactattcactgggccagggcctgcactgggtcctggggaaggggaggtgctttggacaaggtttggacacagaacaggtcagtatggttgtggaaaaatgaatagctctgatcagtggttttcaaacacgagcgtacatcagaatcccaggagggatggcgtgctggaccccacccccagagctgccgactgagtaggtcttgggcagggcctgagaatgtgcgtttctaaccagttcccaggtgatgctgatgctgctggcctaagaccacactttaacagccactggcttagataagtagttccaataccaggtgcaataggggaaggaaaaagtcagaatgatagggatggaagcaaagggagtccagaagagggtgaaaggaacctccacttcggccattgtggaggcttacgtgatattgtagttgggtctctacagtgaggcaggatctgcccaggcagagggaagagcaggcagagccgcacggacgtgggaagtagggagtcttgagtctgctagaggaattctgtctgcctgagctccaggtccccggtggaagaaagactggacttgactgtcaggctgaggagtcacgcactgccctgcaggccaggggtttaaaggctttgggattcgggtgctgggcagggaagttatagtgaagagtttagggtccacctaaggggtagccactactcagcacccactttttgttgccagaccttccaaattatcagagaccagaaacctaaatgtgtatgcaaaaattccccaatttttaaatgttgttaactaattcaaatgtgtttgaaaacatcatgtagaccaaatgagcatatcagcgaggtggatgtggctcgagagcctccgattttagctcagactttantgtgggtagtcaggagccacaggagattgttgagcaggggagagacatgattaaggctgaggttctgattccccaggtgactctttgaggaagggtttccaagactagggggtgctctgtgatgcccctggtggttggagggggcagcaaactgccctgcacagatggggtgactgaccgggtgagggctgtgggagggcctggaatatgggtgactgaacgcagcctctaagcacagcctctctggggagcagtttgaggaggacatcctgaacatctgcctctccatcctggatcgaagccccggtcaccaaaacaacccagccaccgacrtgtcctgccgccacaaccccatctacgtcaccagggtcatcagtgccatggtgagaagcccctccatccctgcacatgtacttcctcaaggatcccccagccaaccccggggccacaacctgtgattcttcccatcaccccttgttttaattcgctgttgttgcagaaccaaccaccccaaaactcagtggtgtaaaacaaccctttattatgcttactgttttttagactaggaatttgggcagggcaccatgagaatggtttggttccactccaagatgcttcttctggggatatcttaatgactgcatatgtctgggatggtttaacaggacctctgtctggggctttggttctggtggttggcagttcctaggttgccatccatgtcatgtctcctggaactggaatgtccaggatggcttccccaccctcatgtcaggttctgggctggggtggctggagcagctgggacccaccagtcatcactctttctacacaacctttccatgtggctagcttgggcttccccacaatatggcagtttcatgcatagcaatggctccccacccccacctccctgccccaagcaattcttccaagaaagaggaagtggaagctcccagtcttataaggtctaggcctggaaactggcacaacatcaattccaccatagtcagtggtcaaattagtcacaggccagcccagactcaagaggaaccctcttcttgagtgggacatagacccacctctccgtgggaggcatgacaactttaacctatcacaggcctcaggctatggtgtttcctcccaaaaggtgtctgcagggcccaccacctccctctaccacatgcaggtattaaggtcagtgggtgggtatctgagattccaaaattgcacaaagctatatttctcctatttgatactctcaattcctcaagacctcagagagcagttggagcacagagaattaacatgagtgacaatcccaaacagcagagcatcacagccctgaggacagtgaaagtcctgaactcaaggctcccaagtccaagtcctagactcatggatcaccacttggactaacttgctgtgtgatttgggcaggtccctgaatgcttctgaagctcagtttttgcatctgaaaaaaaaaaaaaaaaagaataatgaaacctacattgtaaacttcaacaggttaatatagtgtgcacaaaattcttggcatagtggtgtctggcacacaatgagcatttaataaatgttagctgtccctataatgattatgccaacagtcccccaaaacagatcatttaacataggaaatgctctaaagttgtaatgatttttacaacacagtatccaaatggaagataattgaaaatgacaagtgctaccaggaagtaggtattttaaggcaacagatgcccctaattttcagacagttaaaaagcaagagtgaccccgatggacctggtggtccaaagttggacaggatttgaccacgatgcggttcttgaggtaggaagccctgcctggttgtggacccgtgccctcctctgcccaggtgaacagcaacaacgaccgaggtgtggtgcaaggacagtggcagggcaagtacggcggcggcaccagcccgctgcactggcgcggcagcgtggccattctgcagaagtggctcaarggcaggtacaagccagtcaagtacggccagtgctgggtcttcgccggagtcctgtgcacaggtaccctgggaragaagggccccagggtacctgtrcccccagcttcctctatctaaatgtatttacatatatttgcatatgctgcaacccatcttcattgatggattcattgacagggagaacgaagtctggctgatgaagagagaagccagagaatttatttccttcatatctgatcttttatcttgaaggagtcctagctccctctgtctctcattcattgagtgccttgggcgagccctgcggctcccttggcctccagtcccctcaggaagatgagggctctattaggtggcttccaagttcctgccagcctcaaagcctgtctacttacatgaggtggcaacagcatatcctgaagtccttgagagaacgtgcaggagatggtggcatttctgagagtggagatgggagtctcagccccacaacctgatgaactagacacacagacaaagatggggtggcagagggctttggccacaaatgagccagggcgcctgctgtggaagccaggcccctctctcaggggccagggtcccgcctgctccgagcctctctgctctgcagtcctcaggtgcttggggatagccacacgggtcgtgtccaacttcaactcagcccacgacacagaccagaacctgagtgtggacaaatacgtggactccttcgggcggaccctggaggacctgacagaagacagcatgtggtgggtcctgcccccagcctaggcccgagggctctggaagcccagcaggtggagcaaggcctcatcttccataacaccaccagggagcggcaggcccagagcccagctctcctgaatctgagccggctctggagggagtgagaggcgccctgcggatagtggtgcctcttccaagatgtaaggtctgaggtcaagagatgtagactcagaggtcaggaggggcctcaagatttgattgccttgaacscccggttctactctgtctgggaatctgtggcttcctggggtggggtggggtgggaactccttctgcacaggtacctctggatcaggctcctgcttccgtatcagctgcggttctccgtgttgtgtgtctcaggtgggaaacagactccttccttagctaaaacaaaattcttcacataaagctttaaaaaattcattccaggccaggcacggtggctcacacctgtaatcccagctactcaggaggctaaggcaggakaattgcttgaacccaggaggcagaggttgcagcgagctgagatcacaccattacactccaccctggtcaacatagtgaaaccccatccctactaaaaacacaaaaattagccaagcatcgtggcaggcgcctgtagtcccagctactctggaggctgaggcaggagaatcgcttgaacctggaaggcagaggttgcctctgtgagccaagatcatgccactgcgctcyagcctgggtgacagagtgagactycgtctcaaaaaaaaaaaaaattcattctaacttacttaattttctgaaataggaaaaacattcatgtggtttaatatttgaaaggtacaaaatgggttgcagtgatgtctccctcccgcccagttccccagcctccccatcctcctcctggaggcaacactatcactgtctgctacatctcctgtcagagagatgctctgcagacacgagcacatacatacctacagtgcctccccgccttttccctgcttaaacagtattggcagctttatgtgatactgttcttgctggaacatttaacaattccacgtaaatacacagagttttccttattttccataatgttttaagtaataacgtaacacccaccaagcacctagtctgtgccaggtccagttctaagtgctatatatagattaactcatgtatttcttcaaacaacctgtgaataagttaagatcattgattctatttcgcagatgaggaaactgaagcacagagaggttaagtaacccatccaaggccacacagctagtgagtggaagcataagggtatgaacccagtctgcctctcaattgcatgaaaaagccattgttcatctaaccatcccatatggatggacatttcagttgcctcagttaaaaacaagtttgcctttacaaacaaggcttcagtgaataaccttgttcaaatgtctgttcacacatgtgcaagtctgccactcaaagccaactttctaaagattaggagagatggctgggcgcggtggctcgcacctgtaatcccaacactttgggaggccgaggctggcaaatcacttgaggtcaggagttcgagaccagcctggccaacacggtgaaaccccatctctactaaaaataaaaattaaaaaaaattagccgggtgtggtgacacacacctccccagctactggggaggctgaggcgtgagaatcacttgaacctgggaagcggaggttgcagtaagccaagattgtgccattgcactccagcctaggtgacagagcaagactctatctcaaaataaataaataaataaaaattaaaaaataaagattaggagagacagtgaagaaaacacaacacagagacacagagagccttgtatccttgttccccaggggagcgtgccaggagcccttcccgagctggcctccagctcagaccatctctttgctccccttggcctctcctcttttttggttctcttcattcccttgccctggaagcacaaaatactcgcattcttctcttttcttcatgcagaaagcacagacacttcattttgatgttggggactctgtcaccacccaggttatcagggtcccacctttaatccccaaatgctaatcaacatactttccccaacaaaaacagttgcctgccgaagaggagttctgaggccggctgtaaagatgccaagtcaggcaaaccgggaatcaggtttctgtctgctcctttctttctgcaagaccttgagcaggtgatgtcatgtttcctactcatattctcatctttaacacggggaattaaaaataaggctggaattaccagagtctatggtgctctgcataatcagaaccctacctaccccmtctgctggccatatcccagagatacttaaatactttctgctccttgaacacacaaggccttttcttgtctcacttaggacctttgcacatgctgttccttctttctagaatattgttcccttcactcttcctatagcttattctttctcactgaagtctcaccttcaatgtcatttacctagagtaggtctataggggttgttctctagcttaagcccctctttttcttcctaacatttattgtcacttgcatttgtttgatttatctgctgacttagctttgcctgtctcctttgttagaatgtaagcagcatgagagtaaagatcttctgtcttagttgcagtaccttgaacaacaggttcttgataaatgtacacacacatctatatacacacatacacatatatatacaaacatatgtgaatgctgtgtgctcattcatgtggttgaatgagtgattcacaacatgcagccacagttcttgtggaaagtagggagcccagggcctgcctctcagtaggatcttcccttcctatgccctcactctaggcagcttcacccatcctctctctgtggcaggaatttccatgtctggaatgagagctggtttgcccggcaggacctaggcccctcttacaatggctggcaggttctggatgccaccccccaggaggagagtgaaggtacgctcaattgggtggggtaagttccagacccctgcttttccttacccatgctgctcatgcccacccctcctgcccaggtgtgttccggtgcggcccarcctcagtcaccgccatccgcgagggtgatgtgcacctggctcacgatggccccttcgtgtttgcggaggtcaacgccgactacatcacctggctgtggcacgaggatgagagccgggagcgtgtatactcaaacacgaagaagattgggagatgcatcagcaccaaggcggtgggcagtgactcccgcgtggacatcactgacctctacaagtatccggaaggtaagggccacatggcggcctttattaccttcccccggatggcccatcagctgcagagggcccactgcaggtggcctggagccaggcctcaccccatgtatatgacgctgacagcagcttccattcaygttgtctctgtgctctgagccaagtgcctttatttaggctacattaatagcttcctctgtttgctaagcacctcttctaccttagaagatttcccatttgtaataataatagctacatctccttgaacacttgccatataccaggcactgcattaggtatgttcacatacaataatcactactagtaacaataatgatgatagtagcaggtattatttattgaacacctaggacaaacgcatggcacaggcccaattcagactaataataatagcatctcctgtttagcatctgccagggcctgtgccgtgataccaatttatggccattggttcattgaagagcccctacttgttaggctacaaaaacaaaacrgttgtattttttcttatagctgyttccaactatatactttaaaaatctccctttcccactgtgtaacaggttccttagcaatgttatgatctgattaacatattttcaaccatttctgcttgttaaatccatgtcaccaagtaattatgacttcaagctcaaacttgaattagaccctgtctcctcctgtcccctgagcacaagctagagcagtgaccctggaaggttgctaaagaggagacacaatctgctctgaacacctcctcgcctcccttttctgctctctagcatcatattttacagctctggttgcacttttttttttttctttgagacagaatctcactcttgttgcccagactggagcgcaataatgtgatctcrgctcactgcaacctccgcctcctgggttcaagcaattctcctgcctcaccctcccaagtagctgggattacaggtgcccrccaccatgcccagctaatttttgtatttttagtagagayggggtttcaccatgttggccaggctgcccttgaactcctgacctcaggtgatctactcacctcagcctcccaaagtgctgggattacaggcatgagccactgcacctagccccttgttgcacatttgaattatccagggagctgtttcagttatatatcttaaacaataattacttatttggtcaattctgtgggtcaacaatttgggctgtgctcagctgggatggttcatcttctccaggtggtgctggctgggatctcacatatgtctgtcacgtgggactgctgagatggctgggtctgtgttcccactyggcctctcatgtcccaacaggccagcccatgcttttctgaatagcagcaacattcccagaaggtgagagatgaagctgtgaggtttctagaggcctggctcagaatgtgcaccatgtcacttctgccacattctattggtcaaagcaattcatgagcccaatccagattcaaggggtgggaagttgtaaggcattatggccatttttaatctaccacagcaggccagattccacccctgactaattgaatcatagtctctacgggatgtggttttggcactgggactttttaaagctcccaggtggtctctagtgtgcaaccaatgctgagagcactgttaggctaagagggaggcaaagaggacagaagagagcagatgcctttgtcttaactgggtgaggattcagtgctggctaagtgggtgggtgctgctgccctagtttcctatctatgcttgctgaggacagatggtggctccatcacaacctgctgccatccagactaattcctgtgctgttcctctagacactgctgatttcttgtgctatttgggtcctttcaacacagcttctttctgatgcatggtgatttttgtccccaagttctgcagaggttttacaaggctgtggcccccaaccctaacctccactgtgtcccactccaaggctgggaactgaaacctgacacttgtgggtagaaggagcagtcttgactggctgtctcccacctgctgtctcccttcaattctcttctccctgctcaggtagtacatggcttagtaagtaagacgggataaacagacctcccacagggaggagaataccaacttccctttctgtaggcacccccaatcttgatcagccagtcatttyttgctgaagatacccccaaaccttaacactgattcttttaaacacctactcacacccccaactcacactttagctcctatctccaggaacatggcactttcttgactgtcaaagacatcttccactttagctgtcttcttactgtcttggggatgggctatggatgaggggactatgtggtaaggcctcttctgagctgccacctctctgataagacctgcagattgattgctgggtcccttcagctgggagcttctggaacttagaacgtggggtctagcctgggcaacatggcaaaaccccatctctataaaaaatacaaaagaattagycaggcatggtggcatatgcctgtagtcccagctactcaggaggctccagtgggaggaatgcttgattctggaaagcagaggttgcagtgagacaagattgtgccactgcactccagcctgggcaacacagtgagaccctgtctcaaaaaaaaaaaaaaaagtacatgaggtctgtgggtcttttgtcctaagatttaactatgaccagctgggtgcggtggctcacacctataatcccagcactctgggaggccgaggcaggcagatcacctgaggtcaagagttygagaccagcctggccaacatggcgaaaacccgtctctactaaaaatacaaaattagcsaggcatggtggcccatgcctgtaatcccagctacttgggaggctgaggcaggagaattgcttgaacctgggaggcggaggttgcagtgagccaggatcgcacactgcactccaccctcagcaacaagtgcgaaactcctcaaaaaaaaaaaaaaaaaaaaaaaaaaaaaaaaaaaccatggccacaggagaaattaacatcctgttacatgataacagtgatgacaatcactgttactgagcgcyggctgtgggctggccattttcacatgttatgtagtcattttatttaacaaatgtttacaaagcccttaccatgagcttttaagtgagacactagtacaaagtttattttacagaggagaagacagatgtacagagaggcaagttgacccagccagrgaacatagctagtaagggagaactctcctgcagaacccagagcccatgctcctcactctgcactgcactgccactatttaattataatattgtctactgtttattgactgcctactgtgggcaacgtgattttacatttaggttaacaaaaataatagtaacagtatctagaacttgctaagcaaaatggtaagcaatgtccaagcattatttcatttaatatttattttaaaatcattttatgagccaggcatggtggctcacrcctgcaatcccagcactttgggaggccaaggtgggcagatcatctgaggtcaggagttcaagacyagcctggccaacatggcgaaaccccatttctactaaaaatacaaaaattagctgggcgtggtggtggttgcctgtagtcccagctgttcaggaggctgaagcaagataattgcttgctgtcaggaggcggaggttgcagtgagcagagattacgtcactacactccaggctacagagcgagactctgtctcaaaaaataaaataaaatcattttatggataagcaaactgaggtacagggaggttaagtaacttccccaagtttccaaagcccagaagagctggaattctaacgaggcagtctactcttagggcctctgccctccctgctatgctagactgcacatcttcgctgagtggccttggtgtgccatacagcatgctaggctttttcatgtgctctcaaagtagagaccctcctgagtgtcaggcatgattcagaggcaaggggacaaagagaagtccccagagaactcaccacatggtgagctgacagcacagaataattcggagtgactggcactctactggggcatccagaggctaaaggaacaaagaggaggagtctctaattcgaccagggcagaaggtatcaggaaaagcagcctatgggagggaatgctgaagggagtaagatttagccaggagatgaaaggttgagaaggcattccaggaagacagagtccaacaggattccagactcatgctgggcaatattgctcaggcaagccaagacatccttgacttgcatgagcagtattctatagatgaaatgacaggggcttgtgcctctctgagtcatgagcccttgctctgtctgtggaaccaggacacatgctagagctagagcacaaagattcagagcccctgggtacaacatgctcttttatacctaaaggacttggcacaagatgctttctttgcctgggaaggacctgctgacttcaccccaaacttttgcctggccaggggtctcagcaccctattgacttccttctaagcacatatcgcaacttgatatttgcttgaatctttgttgtctccctagaatgctcctagactgagagttctaggatggcaggaagcctgactgttttgttcattgccgtatccccaactcctacagcagcatcaactgcatagtaggtgctcagtacagattcacggaatgaatgaattggggccaacagcatatgaagggcttttaatgccataaggagtctgagctgtatcaagaagggccttgttttgttgattgcaggactggcttatgtgaagctacaggacatataagccacattttcacatttttttctattggcatgtgtttattgagcatttactgagtgccaggcaaccagtgaacaaaatgcgtatgatctttatcttaaaggataaaggagctgacattctagtggggcaggtaaaagtaaacaaataagtaaaataactagtatttcagatactgataagtattttggggaaaaataaagaagggaaagagtttagggactggttgagaggaagcgaacatttgtcatttaaaatcaggtagactctaacagacgcctatagaagactccacattatagcagcaacatatacacattcttggaaagtagaagggtagcattatccagaattgaccatatgctcagccataaaataagcctcagtaaacttaagaggattgaaatcatacaaagtgtataatcttattccaatagaattaaattagaaatcagtatcagaagagaatttgatacatttataatatgtgaaaattaaacaatacatacgtctaaatatccagtgagccaaaggaaagatcacaagtcaaattagaaaatactctgcagtgaaagaaaatgaaaatgcaatatgccaaaatttataagatgcagctaaagcagtacacagtggggaatttatagccgtaaaacctatattaaagaagaaagatttcaaatcaatagcctaatcttctaccttaagaacctagaaaaatggctggatgtggtggctcacgcctataatctcagcattttgggaggccgaggtgtgcagatcacctgaggtcaggagttcgagaccagcctggccaacattgggaaaccctgtctctactaaaaatacaaaaattaattgggtgtgggggcatgcacctatagtyccagctactcgggaggctgaggcaagagaatcacctgaacctgggaggcggaggttgcagtgagccgagatcaggccactgcactccagcctggatcacaaagcgagactgtctcaaaaaaaaaaaaagaacctagaaaaagaagagcaaactaaacacctaaaaaagcagaaagaggaaacaagaaagattaaagtggaaataaatgttaatgaaataaagagcagaaaaatcataaaagaaaatcaacaaaaccagttgattctttgaaaagactgacaaaattgataaacctttagctagactaagagaagaatcaaattactaaaattagagaggatgtcactaccaaccctacaaaaatgaaaagaactatagagtgtggtttttaaagaaaagtatttggttatcatccccagtttctggcacacagctcctaaaactcttggagtcttcagaatgagaagagcatcagctatatagcacattagtgagatgactaggggcatctagatcactttcagcatgggggctggttgcctgaaaaatcaaggcatgattagggattggggactttaaaccccatctctgacctccagggaggggagagaggctgaagattgagtttatcacctaaggyctatgatttaatcagtcatgcctatgtaatgaaactctgtaaaaactgctaaacaatggggtttggagaggttccaggttggggaagacattgaggtgctgagagggtggcatgcttagagaggagatggaaaccccacaccacccctgccccctgccataccttgccctgtgtawctctcccacttgrctcttccagagttatatccttcataacaaaccaggaatggtaagtaaactgtttttctgagttctgtgaacccctctagcaaaytatgaaacctaaggctggggccagttatgagaaccccaaatctgtagcaaagttggacagaagtgtgagtaacccygagtaaccaacacttgtgactggagtctgaagtctcagtcttgtgggactgagcccttcaacgtgtggagtctgatgctaactccaggtagctactgttagaattgaattgaactgaattgaactggagacccagttggtgtccagagagttggagaactggttgttatgagaaacccccacacttttagagtcagaattgctataattaatgacagtttattaggggatactatgagcaactgcgtgacaacatattagataactttagattaaatgggtaaatttctagaaagacactttcttaccaaaactatctcaaaaagaaatagaaaatctgaatagattcacaacaagtaaaaaactagtaatagttcataatgaactagtaatatgaaaacttcccacaaagaaataatcaggcccagattatgtcactggtgaattctaccaaatattaaaagaactaatatcaattattcatgaattattccaaaaagtagaagatgagggaatacttctcaactcattctgtgaagtcagtattatcctgataccaaaaccagatgacatcagaagaaaagaaaactacatatctatctcccttatgaatgtgaaagcaaaaatcaacaatgaaagcaaaaattcatgaatatggaatgaattcagcttactgataaactgaattcagcaacatataaaaaagattatatgccatgagcaagtgggatttatcccaagaatacaagatgggtttaacattgaaaatcagctaatataatacaccrtatcaatagaaaaaaggacaaaataacatgatcatctcaatagatgcagaaaaagcatttgacaaaatctcatacccctttatgataaaaaaaaacactcaacaaattaagaatagaagtaaacttcctcagtctgataagtcacctataaaaaagctacagctaaaatgatacttaatagtgaaacgttgaacatttacaccccaaaatcagggacaagaccaagatgtccttttttgtcatgttgattcgtcatttttatggaagtactagccagggaaattaagcaagaaaaagaaatagatatcttttttaaaattgtattgggaaaactggatatctatgtgcaaaagactgaagttagactcttacattatatagaaaaattaactgaaaatggatcaagggtctaaatgtgagagctaaaattataaaactcttagaaaaaaacataggagaaaagtttcatgatgttggatttggcactgatgtcttgaatatgttgccaaaatattaaaaatagaattatcatacaatccagcaattcagcttccaggtatatgcccaaaagaattgaaagcaggacctcgaagagatatttgtacacccatgttcagagcagcattattcaaagtagccaaaacatctatagccataccaccctgaatacgcccaatctcatcaaaatggccaaaaggtgaaagcaacccaagtgtccatcactgaatgaatgaataaacaaaatgtggtatatacatacaatggaatattatttagccttaaaaagaaagaaaataccaacaaatgctggaacacagaagaaacttgaggacattatgctaagtgaaataagccagacataaaagaacaaatattctatgakgccgcttatatctatgaagtacctagagtagccaaactcatacagacagaaagtagaatggtggttgtcaggggctaagatctggggagaatgggcattattgtttaataggtatagagtttcaatcaagatgaaaagagctctgggtagatggtagtgatggttacacaacaatatgaatgtacttaatgacactgaagtatacacttaaaaatggttaagatggtaaattttatgttatgtattttatcacaatttttaaaatagaaagaagacaaaagaagagagggaggaagacagggagggagaaatggaaacagagaaatttccaaattggaaagaaatttgcacatgacataattttgtatatataaaatcctaaggaatccattaaaaagctattagaaatgataaacaagttcagcaagtttgcagaacacaagatcaatatacaaaaattaatcagatttctagatactggcaatgrataatccaaaaatgaaattaagaaaataaatccatttacaatagcatcaaaaagaataaagtacttaggaataaattcaacaaaagaagagcaagacttacatgctaaaactacaaaacattgttgaaagaaattaatgatctaaataaatgaaaaggcatcccattttcattgatcgaaagggtttatattgttaaaattgcaatactctcaaaattgacctacagactcaacaaaatcctatcaaagttacagctgagtttttttcccccaaattagcaacctgatcataaaattcatttggaaacacaagggaaccccaaatagcccaaataatcttgaaaaagaagttggagggctcatacttcccaaattcaaaacttactacagccaggcatggtggcttatgtctgtgatcccagcactttaggaggccaagtcaggagactcccttcagttcaggaaatctcccttcaggccagctgggcaacatggacgacttcatctctacaaaaacttttaaaaattagctgagtgtggtggcatggctaccagctactcaggaggctgaggtgggagaattgcttgagcctgggaggttgaggttgcaatgagccatgattgcaccactgtactccaccctgggtgacagagtgagattctgtctcaaaaataaacagacaagacaaaaattacaacagatatacagtaacccagacagtgtgatactgrcatgagaatggacatatagatcaaagaaactgaactgagagttgaaaaataaacccttaaaattatgatcaattgattctacaagcgtgtcaagacaattcaatggagaaagaataagaatagtcttttcaacaaatggtgttgggaccactgtacatccccacatgcaaaagaatgaagttgttataccccactggttacatgaaaaattttwaaaaaagggaaataaaaagaatgaagttggcctcctatctcacacgatacacaaaamtttctcaaaatggtttatagacttacatgtgagagctaaaactataaaacttttggaagaaaacataggagtaaatcttcatgatcttcggttagaccaagccttttcagaaacgacatcaaaagcacaagtaacaaaggaaaaaattggactttatcaaagttaagaacttgtcctgcaaacagcaccatcaggaaagtggaaagatagcccatggaataggagagaatatttgcaaatcatgtattgaatggataaagcactctcatctgaaatatatgtatatgtaactcttaaaactcaaccataaaaaaaaaataattttttttgagagcacctgaaagtccaaggcatgaaccaccatgcttggcccatcctagcaccttgagaggccaaggcgagaggagtacttgaggctaggagttcaagaccagcctgggcaacatagcaagactccatctctacaaaataaagaaataaataaataatccaattttaaaatggcaaaggatgtgaatgaacatttccccaaggaccatacacaaatggccaataagcacataaaaagatgcttaacatcattaagtcattaggaaaatgcatgtcaaaaccacaatgagataccacttcacatccactagaactaccgtcatcaaaaagatagacaattagtgttggtgaagatgtggagaaattgaaacactcatacattgctggtggaaatttacaattgtgcagccactttggaaaacactttgacagtttctcaaaatgttaaacatagtgttaccatgacccggcaactgcactcccagctacatttccaagagaaatgaaaacaaacacccacacaaaaactttacatgaatatttatagaaacactatttaaaatagataaaaagtagaaacagctcaaatacccatcaatagataaataaaatgtatatccatccaatggaatgctagtcagaaataaaaaggaacgcagtactgatacatgctacctacagtgtgaacgaaccttgaaaactgatgttaagcggaaaaatttcacaaaagaccacgtgttgtatgattccctttatatgaaatgtccaggataggcaaattatgaattatattagtggttgcctagggctggggttggggtggggaggaatgggaagtgactcctgatggttacagaatttgggggggggggtgaaaaaacgttctaaaattagattgtggtgacggggtgcacaattctgtgaactactaagaaacattgaattgcactcttaaaatgggtgaattgtgtgttatggaattatatctcaataaagttgtttaaaaaatcaggtggtcagagaaggcctccatgagaaggtggcattacattctttggcagggaaatgaaacattttcatagtaaaaatatattgtacagtagcagaactcacatacattttaataataaaacatggaatgttaaagaaccttggtgttcacagcaacatcaagtgaccaccaagtgatcagaccagggtcacacagtatcagggtaccttcaggggagagtggtgtgaagaccacatgccacaggtttcaaatagggaaggagaaccatcagaattggactttggaatcatcagagtggaaacagaactggaatgggatggatcctacattcccaggaagggaggggatgttcttgattatcctgctcagtgccttgcttgtgggcctcttgtccccactttacagataggaaaactaaagcttgccgggacagattaatgaaaacagtwataaaagttcacacactgacctcatggtgaggcagtttgtwtggtggtttgatgggggaagagaggtgagagaagaggacagattccagagcctaaggaggatgctcagcaggacctggtgagggctctgttgtgagtgataaaggtgagagaagagtcaagaacactcccaggcttctggcttgtacacccgggctcatggctgcaccattggctgggatgaggaatgctgctgcgcagttggtgggtttggttggatttgaggcacctgtgagacacctggggggcgctgtccagttctttgtattgttctggagctcaaaagagaggtctgcactagcagtggggaaagtggtgtatcaggggccctaaactcacatgtctacaggagccccaccgatagaaccccatgagtgagaattacagggtgaagaccatggacaacaagagagtgcgttccctctagggggggctgctattgctcaactctagactgaggtagggcatgcaggcttagcccaggagggttcctggcatcacccaggaaagaattcaaggatgagccagtggtgttagcaacttttcttaaagcagcagtgtgcagcaacagcaaaggtgctgctccttgtgggccagggctaccccataggcagtatgcccagcatagcagctctgagtgacagagtgagatcctgtctcaaaaacaaacagacaaacaaaaagtactacaaatatacagaaaccccgacagtgtgacattggcataagaagggacatatagatcaaagaaattgaactaagagtccaaaaagaagcccttaaaattatgttcaattgatttctacatgggtgtcaagacaattcaatggagaaagaataaaaatagtcttttcaataaatggtgttgggaccgctgtatacccacatgcaaaagaatgaagttgttataccctacagttctgtaatcatatttatactcagttttaattacatgcaaattaaagggcagattatgcagaaatttttaggaaaagggtggtaacttccaggtgattgccttgaaaaggggtagtaagttctgggtgttgccatagcactggtgggcatgtcttatagagaagtgcttttgcctcctccctgtttccattcgtctataatctagtcctgagtttgagccccagctcctgagtcaagtcccgcctcctgcctcaagaccattattgccatgtagagagtggtaagggagcatgaatggaatttggagctttactgcctggttcaagtcccagctccctcacttaccacataagctgtgtgattgaggagttactttacttcyctgtgtctcggcttccttgtctgttaaatgtgggtgatgataatacctctgtagtacctcctagagaaaaaaaatatagcaccaagtgctatagtacacatagcaaatctgcaaaagtgctagctatcattattatmtgaggcttttgacccagctctcagagaagctggaaatttgcatttttatgtgaaatttcctggcaactgatttaaaactttatttacatagagaatcaaacrcaaggcatgtggcgccggtgtgcatatggctcttgaactgccagtttgacttccatgagccatagtaaattaaaggagcaagggggtgcctgccgctgacgttgtgtgatgccctgcagggtcccggaaagagaggcaggtgtacagcaaggcggtgaacaggctgttcggcgtggaagcctctggaaggagaatctggatccgcagggctgggggtcgctgtctctggcgtgacgacctcctggagcctgccaccaarcccagcatcgctggcaagttcaaggtgctagagcctcccatgctgggccacgacctgagactggccctgtgcttggccaacctcacctcccgggcccagcgggwgagggtcaacctgagcggtgccaccatcctctatacccgcaagccagtggcagagatcctgcatgaatcccacgccgtgaggctggggccgcaagaaggtaagtgtacgctggcttggtggaatcaggccaaaccacctcctttttcaggagggttgtggaggtcagagggatttcccaggactgcattcatccccaggaaggaaggggacattcctgagcattgtgctcagtgccttgcctcttgtcccgactttacagatgagaaaactgagactcggaggggcaaaacactaataacagtaatgcaagtccacatgcatctggtggcaatctgatgaagatgtgatttatagtttctatttttttaattagaatgaatatttacacaccaaataaatacatgctgggggtatttcagcatatatggaatatgccatgcattacttttctaaaatccaaaaaaatctggagcccatttggctccaggtgttctgtgggagagggctggactggtaacagatggttttctttgttttggttttcgggtttttttgagacagagtctcactctgtcacccaggctggagtgaagtggtgtgatcttagctcactgcaacctccacctcccgggttcaagggcttctcttgcctcaacctcctgagtagctgggactacaggcgtgcaccaccacacccagataatttttgtatttttagtagagagggggtttcatgatgttgcccaggctggactcgagtgatctgcccgccttggcctcccaaagtgctgggatgacaggcttaagccacggcaccaggccagagatgtttaytaagtgcttaaatgtgccaagtcctgtcccaagaattctgcatgcgacggcacaatccctccagccaccttgtgtgtggtactagtgctagctccatctttgaaaggagaaaactcacaccaagaaaggtgaagtcacgagttcagagtcacacagtcagtgtgcatagttgcaggacccaaatccaggcagtctggcatgagagacacactcctgacyaagaycaggaaggggcaaagccagggttcaaagccaggaacgttgaccacagtgcacatttactcagctgatgcaattgcttgactgcaggttatggaatggtcaggtcagcccacaccagatatgctcaacacacctaatggtacatttgcctaaaatttatccttagtatttcatagcagaagagaatggtttcagtctttttaaaggtttttgtatttttttaactgaccttattccaactgtttctttaaaaatatattgaggccgggcgcggtggctcacgcctgtaatcctagcattttgggaggccaaggcgggtggatcacgaggtcaggagatcgaaaccatcctggctaacacggtgaaaccccatctctactaaaaatacaagaaaattagccgggcatggtggcacacgcctgtagtcccagctactcaggaggctgaggcaggagactcacttgaacccaggaagcggaggttaaaggattttttcgtgatccttgaacacatagcacttcgtggatgatttattaaatgtatcctctttgattattcttgcacttttttcctagtctgtctgtctgtctttttgccggtatctccctctccatctgtctctccttccctgtctgtctctctgtctctgtccctttggctttttcatctgtctctctatctctctcagtctatctctgtatctctatctctcctttgcctctctctcctttcacatactttctgaattctaaggattcaattaaacaaagaaattgttgctctgggccagtttctggtaagtgaagcttgtggattttcgcagggtgtgaaaatgtatgaaggaggtgtcacacttttttagctttttttgtcatttatttttcacaaagtctaaatcacaaaataacacttcatcataaaattttaattaacacacacttccctctggctttcagcaatttttttcatattaaaagtaatacatattcataaaaatttggaaagcaaaagagaaaaatcacctatgattctaccacccacctacaaactgttaatgtattttacttccaaatccttaatgcctgtttgctttttgaaaaacagttctggttaaatattgcaaatagtcattaatgccctgctcttttcatattgcattgtattttaaatatttttataagctcctcacaaacatcattttaatagatatttaaataaatagaatttaacagatctttaaataaatatatggtgacctatsttttcttttaggtagttatcagcttattgctattaaaaataacactaaacttttgtttatctacagagtgtcaggtaagcaagtgaacattttgatgcaaaaagaaatcactttttttcctctggattttggacttttgttagactgtatcacaaaagtgaaattcttgggccaggcgcagtggctcacgcctgtaatcccagcactttgggaggccgaggcaggtggatcacgaggtcaggagatggagaccatcctagctaacacagtgaaaccccatctctactaaaaatacaaaaaaattagccgggcgtggcggcatgcgcctgtagtcccagctactcaggaggctgaggcaggagaaaggcgtgaacccaggaggcagagcttgcagtgagccgagatcgcgccactgcactccagcctgggcaacagagagagactcttgtctaaaaaaacaaacaaaaaaaaaagtgaaattctttggccaaatgatagactattaaaacatataatttattaaattattaggtttttaagtagttttaggttttcagaaaactttgagtgggaagtacagagagttcccatacccctgtccaccaccacgcctctcctcctgttattaacatcttgctttagtgtggtacatttgttacaattaatgagccaatattgrcacagtattattaactaaaattcatagttaatattagggttcactctgtgttgtgcattctatggcttttgacaaatgtataatgacatgtatctaacattccactgtcatacagaatagtttcacccctccaatatccccatgttccagctatgtgctccacctattcatccctccttcccttgcctgaacccccagtgaccactgatctttttactgtctccacacttttgcctgtttcatgatgtcatctagttgaaatcatacagtgtaattaagctttttcagattggcttctttcacttagcaatatgtatttaaggatcccttacggtttttgtgtcttgatgggtcatttcttcttattgcaaaatagtattccattatatggaatacagtttatccattcacctactgaaggacttcttggttgattccgagttttggcaattatgaataaagctgctgtaaacatccttatgcaggtttttgtgtgggcttgagtttttaattttttttttttattttttgagacagagtctcgctccgtcaccaggctagagtgcagtggtgtgattttggctcactgcaacctccgcctcccgggttcaagtgattctcctgcctcagcctctcgagtagctgggattacgggcacacacgactacacctagttaatttttgtatttttagtaaagacagggtttcaccatgttggccaggatggtcttgatctcctgacctcgtgatccacctgcctcggcctcccaaagtgctgggattacaggcatgagccgccgtgcccggctcgaattttaaattctttagataaataccaaggagcacacttgctgcaccttatggtaagagtatgttttggtaagaaactgacaaactgtcttccaaagtggctgtatcattttgaattcccaccaggaatatatgagcattcctgttgttccctattctatccagcagatggtattgtgtgttttggattactgacattgtaataggtgtgtaataatatatcagagtttactattcactaatgacatatgacattgagcatcttttcatatacttatttgacatctctatctcttctttggtgaggtgtccaggtcttttgcccatattttaatcgggttgttcattttctcattgctggtttttaaaaggtctttgtgtattttggataacagtcttttatcggatgtcttttgcaaacattttctcccaggctgtgtcctctcttcccagtctcttcacagtgttttctgcagtgcagagtttttagttttaataaagtccaacttatcaattttttctttcatggatcatgcctttggtattgtatcaaaaaaaattaccggctggatgtggtggctcacggctgtaatcccagcactttgggaggctgaagcaggtggatcacttgagatcaggagtttgagaccagcctggtcaacatggtgaaacctcatctctactaaaaacacaaaaagtagctgggcgtggtggtgggtgcctgtaatcccarctactygggaggctgaggcaggagaatcgcttgaacccgggaggcggaggttgcagtgagccaaaatcacaccagtgcactccagcctgggcgatagagcaagactccatctcaaaaaaatatatatatattaccaatctcaggtcatctagattttctcccatgttatctttaagagttctgtagttttgcattttacatttaggtcaatgattcagtttagtacattttgtaaagaatgtaaggcctgtgtctagattgtttttccccgtgtggatatccagttgcttcagcaccatttgttgactatcttttctccattgtatttcctttgctactttgtcaaagatcaactgactatrtttgtgcaggtctatttctgaactctcttctattccattgatctagaggcatacctcagacatattgcaggtttggttccagacaaccacaatagtaggaatattgcaataaagcaagtcacacaaatgttttggtttcccagtgcatataaaagttatatttacattatactgtagtctataaagcgtgcaatagcattatttcttttaaaaaatatatacaccttaattttaaaatactttacggctataaaatgctaacaatcggggccaggcacaggcggtgcatacctgtaatcccagcactttgggaggctgaggcagaaggatcacttgagctcaagagctcaagaccaacctgggcaacatggtgaaaccccatctctacaaaaaaaataaataaaggaagaaaacaaaaaaaattagccaggcatggtggtacacacctgttgtctcagctactcaaaagtgaggtgggaggatcacttgagcccgggagktcaaggctgcagtgagctgagatcctgccactgcactccagcctgggtaacaaagggagactctttctcaaaaaaaaaaaaaaaaagttaaccatctgaaccttcactgagtcataatctttttgctggtggaaggtcttgcctcaatgttgatggctgctaccttagttgataaagcagtggcagggtttgacaggattgactccaagtttgaaagaagttctactgtgagtaaaatgctatcaaacaccatcgcaacactactacctgaccagggtagtggttgccaaaggttggggtggttgtggcaatttcttaaaataagacaacaacgaaattcgccacattgaatgactttcttcctttcacgaaggatttctctgtagtatgcgatggtgttcgatagcattttactcacagtagaacctctttcaaacttggagtcaatcctctcaaaccctgccactgctttatcaactaagtttatgtaatattcaaaatcttttgttgccatttcaacaacrtttagagcatcttcaccaggagtagtttccatctttgaaaaacactttctktgctcacacataagaagcaactcttcatctgttcaagttttaccatcagatggagcaattcagtcacatctttaggctgcactctaattctcttgctgtttccaccacatcatcagtgacttcctgcattgaaatcttgaatgcctcaaagtcatccataagagttggaatcaacttctttccaactcctattaatgttgatatttttacctcctcccatgaatcatgaatatacttaatggtgtctagaatggtgaatcttttccagaaggttttcaattgactttgcccagatccattagaggaatcactatctatggcagctatggctttatgaaatgtatttcttaaataaaaagacttgaaagttaaaattactcattgattcatggtctgcagaatgaatgttaacaggcatgaaaataacattaatctcattgtacacctccatcagagttcttgagtgactaggtgcattgtcaatgagcagtaatactttgacaagaatcttcttttctgatcagtaggtctcaacagttggcctaaaatattcagtaaaccatgctataaacagatgtgctatcatcctggcttcgttgttcctttatggaccacaggcatagtagatttagcataattcttaagggccctaggatttagaaatttaaawgagcattggcttcaacttaaagtcaccagctgcattagctccttaatgcacagagtcagcctctcctttgaaactttgaagccaggcattgacttctgtcccgctatgaaagtcctagatggcatcttcttccaatataaagctattttttctacattgaaaatgtgttgttttatgtagccatcttcaccaatgatcttagctagagtctctgcataacttgctgttgcttctacatcagcacttgttgcttcagcttgcacttttatgttatagagatggcgtctttccttaaaccttatgaaccaacctgtgctagcttcaaacttgtcttctgyagcttcctaacrtctctcaatccttayagaattgaagagaatcagggccttgctctggattaggctttggcttaatggaatgttatggctggtgtgatcttatatggagatcactaaaactttctccatattagcartaaggctattttgctttcttatcattcctatgtcacttttagtttccttcaagagtagcrcttttaatttccttcaagaactttccctttgcattcaaaaccttgctgtttggcacaagaggcctagcttttggcccatcttggctttctatgtgccttcctcactaagcttaatcatttctagcttttgacttaaagtgagagacatgtaactctcattaacttgaacacctagaggccattgtaggtttattaattggcctaatttcaatattattgtgtatccgggaataggaaggcccaaggamagggagagagatagggaaatggccagtcggtggagcagtcagaactcacatgacattttttaattaagttcaacatcttacagggcatggtttgtggtgctaacaaacagttacaatagtagcctcaaagatcactgatcaagggctgggcacaggggctcatatatgtaatcccaatcccattcacttttggaggccaaagtgagagaactgcttgaacctaggagtttgagaccagcttgggcaacacagcaataccccatctctacaaaaaattaaaataaaaaatacctgctgggtgtggtggcatgctcccatagtcctagctacctggaggctgaggcaggaggattgcttgagcccaagagctggaagtttgcagtgagctatgatcacaccactgcacytacagcctgggtgacagagcaagaccttgtcttaaagaaaaaaaaaaaaagatcactgatcatagaagcaaacacatgctcttggaaaaatggctcttatagagttgcctgactcagggttgccacaaaacttcaatttgtaaaaaatgcaatatctgcaaagtacaataaaatgaagcacagtaaaataaggtatgcctgtctttgtccattctttcactaataccacactgtcttgatgactgtacctttatagtaaatcttaaaggtacctgaagtcaggtagtgccagtcctctaaytttgttcctctccttcaatawtgtacaattgtacaattgtactgactactctgggtcttttgcctcttgacataaacttttttatgtcatggctctttaaaaaaatcttaattgatatatattagtartacatattttgtgggtacacatattttgatacatgtatagaatgtgtaacaatcgaatcagggtaattgggatatccatcaccttatacatttatctgtatcttttcttcgtgttcgaaactatacaatttattctagctatttagaaaggtaccataaatcattattaactataatttccctactgtgttatgaaatattagaacttattctttctaactatcttgtacccattatccaacttctcttcattcctgcctcccacccacacataaagtttggaatcagtttgtcaatatccacaaaataacttcttcagattgcattgaatctatagatcaagctaggaaaaattgacattttgacaatattgagcctttctatccatgaacatggaatatctctccatttatttagttttttgatttctttcatcagagttttacagttcttcttgtgtagatcttgtacatattttgttaaattaatgcctaagtgttccatttttggtggtgctaacataagtggtattatgtttttaattttaatttccaattgttcattgctggtatataggaaaatgattgacttctgtatattagtaatcttataccctgtaaccttgctattaccactcrtaagttccaggattttttgtttgttgttgttgacaattcttttggattttctacataaacaattatatcatttgtgaacaaagactgttttatttcttccttcccaatctgtatacattttatttcyttgttttatcttattgcattagcaaagacttccaatatgatgttgaaaaggaatagtaagaggggacatccttgccttgttcctaatcatcatgggaaagcttccagtttgtcaccaataaggacaatgtttrctgtaggttttttgtagatgttctttatcaagttgagtaaattcctcctctattcctagtttgctgagagctttatcaggaatgggtgttggattttatcaaattctttttctgcatctattgatatgatcatgttattttttcctgttgatytgatggactatattaattgacctttaatattgacccagccttacatgcctagaataaatcccacttgatcatagcatgtaattttttatacattgttrattcaatttaccaatattttgtgggaatttttgcatctatgttcatattggtctgtagttttgtttttcttgcaatgtctttgtctggtttttggcattaaggtaatgctggcctcatagaatgaatcaggaagtatttctctgcttccattttctggaagagattgtagagaattgctataatttttttttcttaaattcttggtataattcaccagtgaacccatctgggattaatgtgttctggtttggaaggttattaagtactgattccattttttartagatataggcctattcatgttgtctgtttcktcttatgtgaattttagcagatttttttctttcaagaactggtcccttttatctggattatcaaacctgtgggcataaagttgttcataatattcctttactctctgtttttttcctaactccccaaacttgttacctttactatccttttaatgtccatggaatctgtagagatgtcctctctkgcatttatcatattagtaacttgtgccttctctcttttttttctgagttagccttgctagaggcttattgactttactgatcttttcaaagaaccagcttttggttttggtgattttctctattgatctctgattttcaattttactgatttctgctctaatttttattatttcttttcttctgcttaagatgagtttaacgtgttctcctttttatagtttcctaaagcagaagtttagattattggatttagatccttcttcttttctatcatatgtattgaatattatagacttctctctaagcactgcttttgctgcaacctacaagtttgtgtgttgggggaggggtgtttgtttgtttgttttgttttgcttttcagacagagtctcgttctgtcacccaggctggagtgcagtggcacaatcatggctcactgtagcctcaacttcccaggctcaggtgattctccctcctcagcctcccaagtagctgagactacaggcacgtgcccacaaattttgataagttgtagtttcattttcatttacttcgaaatacttttaaatttctcttaagacttcttctttgtcccatgtgttcttctagaagtgtgttgtttaatccctaggtattttagatttttcagctgtctttctgtcattgatttccagtttgatttcattgtgttctgggggcatatattgcataatttctattattttaaacttgttaatgtgtcatttatgccacagaatgtgatcctttttggtgagtgctccgtgtaagattgagaagaatgcgtatcctgctgttgttggatgaaatattctgcagatgtcagttagcccagctgagtgacggtgctattgagaaccattgttctagggaaaggggtctcagcttttattagattgttagtggtgtctatgagtcagagaacttcaaaaagccctgatgcaaacattttaaagggctacttttctcctcctttctcccaggatctgagctgatgcccaaagctctgctcatgtgtatcatatggtggcatatgatggttcttcatgctggagactgagaatttacatctctaacaagttcccaggtgacgctgatgctgctggtcccaggaccacacttggagaaccgtggtctatcaccatgcaaggagtaaatgatataatgtatataaagtatttggcatcattcttactacctaatgarcattcaatttatgtttattatcagtgtttttgatattattatcaataataatatattatcaataacataataaatcaawcaataaaataaaaataataatacccgctcatggaattgttgtaaggattaaataagtcaatctgtgaaagcgcttccaagtgcagtacactttaatcccttagtaaaacttagcttttataattataattattattgttattttgagatagagtctctctctgtcgctcaggctggagtgcagtggcgcaatctcagctcactrcaacctccgcctgctaggttcaagtaattctcctgcctcagcctccyaagtagctgggattataggcacaacaccacgccctgctaattttgtaattttttttagtagagacagggtttcaacatgttggtcaggctggtctygaactcctgacctcaggtgatccacccgccttcacctcccaaagtgctgggattacaggcgtgagccacggcacccggcctataattattatttattactgttattgtaataaaggttcttccaataatgacctactgaactaagggagcccataaaacaaaatcatactttaacacatgaatcaccctactggcattcaggagaatctacgatatgcaaagccctggggtagcagagcgcatgagccaagttgagccctttaaggaccttttccatgagttaaaaactcagatgccttcagagtcagaaagaaaacagaaataaaggaagcagtgggagtagaacaatagggaatgagagggcctgggagcaaaccagaaagagcacattgaacctaaaagaaagaatatatagtagtcagaaaaaaaaaaaaaacaaatatggtccaggcatggtggctcacacctgtaatcccagcactttaggaggccaaggcgagaggatcatgaggtcaaaagatcgagaccatcctggcgaacatggtgaaaccccatctctactaagaatacaaaaattagctgggcatggtggcatgtgcctgtagtcccagctactcaagaggctgaggcaggagaattgcttgaacccagraggtggaggttgcagtgagccgagatcatgccactgcactccagcctcgcgacagagcgagactccgtctccaaaaaaaaaaaaagactgaggtttatggtgatccatgcttacaagaaaagaacacctaggaaggatgtttctgactggtgagagggagacagagatggccaggaccacaggagctcagagagcatgagagcactgggaggaggtgtcagtgaagacttccctcagttggtggggctgaccaggactgggccttcatggaggggggcatttggaaaagttgtagggaattggcctcacaggattggaagattgaggcatgcctttggtcttcctcttctctgctcctagcacatagtaggtgctcaataaacagagaaggatgggatgaatggatgatgggctgagagatttycatcttgaataagtagggaaagcttggaaacatctctgggggctcttggagaaattatctggtattgtggtagctccctgacctaaatttgactcccacctcatcttaatttcttggtttacttcctatatgagtttgaacaggaaaatacccactctgggccttaggtttcttcatctgagaacygaggaaaataaagcctgtctcagaatggttgcaaggaccagagagaaaggagctattagttgtgcattcccttccttcttcccagtgccattgaagaaagacatcaagccccaactcccacttctgctttcccttccagagaagagaatcccaattacaatatcttactctaagtataaagaagacctgacagaggacaagaagatcctgttggctgccatgtgccttgtcaccaaaggagagaagcttctggtggagaaggacattactctagaggacttcatcaccatcaaggtgacctcagcctgcatctaccatgctgttcctagtggcacccactccccagagctgggggagggcgtcagaagctgggggggtttgtgcctttaactccagctttagctctccagggtggraggagtgggttggacataaggggatgggtgcaatagtggcactcagcaatggggtatatggaggtgggggtggacatgactaatgatccatcctctaactcagccaggaccatcggtttcctggagggaggaggggtaggcgcgatggctcatgggtgttgtccccttcaggttctgggcccagccatggtgggagtggcagttacagtggaagtgacagtagtcaaccccctcatagagagagtgaaggactgtgcgctgatggtggagggcagcggccttctccaggaacagctcagcatcgagtaagtgccagcctggggggctggcagggaatggggctctcttccttgtggatgagccagagagaagttgccagggatgggggtgtgagagagattctggacaccccaggaaccagcccacagactatacatatcagccttcattcacttatttattccttcattcatccaatcattcatttactcaaatcatataactcattcactcagtcattcactcatatcattcattcatactttcatttatttatccatttattcactcactttcattcattkgctctctttcactcattcattcatgcattcttcaatttgcttactctttattcactcatttgttcattttttcattcacttattcctacatttatgcttcactcattcattcacacatgttcccatttgttcatggattcgtttatttacttattcattgtcaatcattcattcactccttcattcttccattcatccacttgcaactcatgtggtccttgattatactgacctgtactctggcccatgtgtaattgttaggaacactaagatggacagaaacagttttgcctggagaagggctctcagatacagatggcccttcacatgaggacagtgtgatttgtgaaaaagatcttgtccaaggtctgggggagcaaaagcagcccttaagtgagggtggggccaggaagaagtcccagtggagctggtgtttgagctgagccttaaatgatgaattgagattttcaggtatcaagaagtaaggacggtttgccaggcaaaggtcttggtgtcaacacctgatggctggtgttgtcagggaaggtctcctggaaaaagagaacttgatttgggccttgggtggattggaataagaaaggcatcctaggtggaacagagcagatgaaagcccagaggggggaagttcagggcacagacagaaaactagcctggctagatgggaagagtgtgggtggtagaagagaaaattaaattggaaatatgtttttttggttgttgtttttgtttgtttgtttttgagacagagtctcactctgttgccccagctggagtgcagtggtgcagtcttggctcactgcaacctctccctcccaggttcaagcgattctcctgtctcagcttcctgagtagctgggattacaggtgtgcaccactgcacccggctaatttttgtattttagtagagatgaggtttcaccacgttggccaggctggtctcgaactcctgacctcagatgatccacctgcctcagcctcccagtgtgctgggattacaggagtgagccaccgcacctggcctgcaaacatgttgataaggcttgaatrtcaagccacaaggtgaacttgatcctgaggagcctggggagccgtggattggcaggccagactcagaatggcaagaggactgacagtctgcctttctcccctccytttcctccagcgtgcctaccctggagcctcaggagagggcctcagtccagtttgacatcaccccctccaaaagtggcccaaggcagctgcaggtggaccttgtaagccctcacttcccggayatcaagggctttgtgatcgtccatgtggccactgccaagtgatggatcatgagggactgagaggggtggattyggcccctgtcctcctcctgcccattctttgtctcttccacatgggagccaggaggcctcagttaatcctgcctcaacctctgccctactttgtaaacttaggcaagttccttctcctcctgggcctcagtttactcttctgtaaaatgaagkgttgcactcagtaatccttaaacttttggacaaccatagatgatgtaagaaccgagggagcctctccaaccttcatctctcatccccatggctgggaggttgacagacccgagcatcagagaaaccctggcccactcagctctgccatcttccaccctgccacctcgctgtcaccctggctgacccttggactctccttgcttttcaaatgccctggccacatcaagagccaaggatcctccccacagtcctgacagagaatccaaaagtatcagagctggaacctaaccatccctcaacactcccattacagagaagaaggaaacttacagaggccacagggtgagctagaggcagagtggaggcccatgtgtgtgccatttatacctcctaagtcccgatcctaaaaagcattagattttaagcaaagggagattttccctcagtgaagacacaggcccaggatctgaggggcgattgctgcctaggataatcttaagaagataaaggaagggcccaaactggattgcattcctctaaaatctgcagccccaaatctgaagagggccagtgactaacagcacaaacaacagcaaacacctcacagggctcaacttacacaattctgaccgaacaattaaagttgagaaaatgtttcattcaatgggtgccaaaactgttgcccccagatcagctgcaaacaagagcagagctttccgtggaaattgtaaacaagggatcaagatcccgaagcatttcttcaaagaattgtaacaggatggaacatggctttaccaatacagtcctaaagacaaagcacaatcgaagcaatggctaccaagagggggaaatggttcagtcaaagcaacagtggaccagccggccaggcgcggtggctcacacctgtaatcccagcactttgggaggtcgaggtgggcggatcacttgaggtcaggagatcaagacctgcctggccaggtgaaccccatctctactaaaaatacaaacattagccaggtgttgtggtgtgtgcctgtaatcccagctactcggaagactaaggcaggagaatcacttgaacccaggaggtgaaggttgcagtgaaccgagattgcaccactgcactccagccygggcaacggagcaagactctgtctcaaaaaaaaaaaaaaaagtggaccggtcaggtgcaaagcttgtagaaactgttttttgggatgctcaagacattttgcttgtcggttttctggagaaccaaagagtaacaacacctgcttattacgagtgttttgataaagttagctgaagctttcagaaaaaaaacccagaaaagcttcaccagagagtccttctccaccacaataatgttcctgctcattcctctcatcaaacaaaggcaattttgtgagagggttgactggaattcattaagcatccaccatactgtcctgatttggctccatctgacttctttttatttcctaatctcttttttttttttttttttgagacagagtcttgctctgccgcccaggctggagtgcagtggcgcgatctcagctcacctcaacctcygcctcccgggttcaagcgattctcccgcctcagcctcctgagtagctgggattacaagcgtgtgccaccaygcccrgctaatttttgcatttttagtagagatgggatttcaccatgttggtcaggtgcgtctcaaactcctgacctcaagcgatcctcctgcctcagccttccaaagtgttgggattacaggcatgagccactgggcccagcctgtttcctaatcttaaaaacaaaatctttaaagggtgcccgtttttcttcagttaattgtgttaaaaaaaaaaaaaagactgtgttgacatggttaaatcccctggaccctcagttacttaggaatagactaaatggcaggtattattatttacaaaaatatcttgaacttgacagagctcatgttgagaaataaagtttctactttttatgtttatgttttaatgttacttttccatgaaccttttgaagtccccttgtaggtgtttagggaggggaatgtagctgaaggtggtgagggccacctgccacatagctctgtttccagtacaacgctcttgcccttggtgccttcgagtagcattttaatgggacaaaagtggcctccctggttattccagccccagtggaaagcagaagccrccccaacagccaatgagaaagccctgcttgtgagtgggagaggtagagaaattgacagaagacagcttagaagtccaagggagagtgtgagtgggaatgtggttttggaaattacaaagaaaaatgtgcaggtagggaattcctttcagctggtagggcaagaccctgaccatgcgcttaacacaggaagggcagaacaggtagttcaagactgagaaaagccttagaattggctggccatgggacactcagaaggacaccagcaacagggctttactgagtctcaggactcctgcttccattgagtccccctgtctcttaaacactatctgaaacttcatgaaggcccttgacaccaagttaggtcagggatctgagctttcacataccagaggggcctccaaacctttagaacagaggttggcaaacttttctgccaatgaccagatagtaaatatttcaggctttgcaggccatagagtctctgttacaactactcaactctgctgctatagcatgaaaactgccatacttagtgcataaacaaatgagcctggatgtgttgcaataaagttttacttacaaaaacaggtggcaggccaagtttggcccacaggttgtagttgactgaccttgccgtaggacaacacattgcttccaatcttgctccaggactgagctctgacaccaggctacaccttgccctagcatcgagcctaaacctgagccaaggccaagcccttaacaagcctcggactgaaactaggatgaggctccagcttgtgctcgtgaccccaaagacggccgtgactcagaggctaactaggtcatgaccctgatgccagatgggccccagaccttggcctcacactaagccctggatcctaccatagctaaatcctggcttgactctggctctagacagagcttgggctccacgtggagtcctggtccagtaccagacagtaccgaccccagactgagctctcatgccaacctcagatgactgagctccaatcctaagtgaaccctgaccccagactaagcccgaacctcaaacagagctctgatccaagactgagctctgagcctacactgagacctgattcaggctctggctgacccctgaactcactcaggtcccagatggatctggccttagctttggatttccattctcatctgagtttccccatatccctggtcactgggtgaagacagcctgtccttgagccagggatctgcgctcaccttcctttccctttgagacacttgggtagaaatatttgagaagcatggtgacccccctggattttttagctctgtcactctgtgagaatctgcattcatagcccaatccttatggagcgactgaccagggatccctcctctcatcatgcggrttcctttctcctattatgcatctgccacaagtgaaaggaacactgtaagcatcttccctggaacaggaggccatctgccactccacgtataaagatgctccttcccgcagggaggctccacgtgtcccagatccatttccccttgtgatggctccagacacatccttccagcaaatgccagctatctgtatgcctcgagctcggctgttgcaggctgagttcctagaaagctgattctgagatggagtttaggatgcaggatgttgatctaacagtgatctagggttcaacacccatggaagggagtgggggagcatgagtgtgcagaggaaggaatcgaaccatggtgcaggcccagagatagcctgtcctgaccccaggcagctctggagctagaatggcctatctgagttgtccagtttgggccaagatggctgggctttcctatgcctgcctttgttagcgattcacccaggaagggacatgaccttggctaagacagctctctacagcaggggccagccctggagcagctgacagctaagggtcatctgcctgcagcactcacagcagtttgaggaatgagccctccattgagggggttctgagccatgtgtctccatgtcccccacctacattctgtcaaaccccaagaacagagcagtgacatgataggttgcctaggctcgtgctcacagagattatcctctagctggtggagacaggtgttcatcacatttgaaaagatatgaaaaatacagtgagaaatacaagtaaacaagtagacaaattcgtgaataaataagctaattaaatttagtgaataagtgccaaaaagaagataaaagtgacagccacctctccctgagtggtggagttaagatagccctatagccttactttatttatttatgttttttatttatttattttagacagaatcttcctctattgcccaggctggagtgcagtggtgcaatcttacttcactgcaacctccacctccygggttcaagcaattctcctgcctcagcctcccgaatagctaggggtacaggcacacaccaccacacctggctagtgtttgtttgtttgtttgtttgtttttctttttttcttttagtagagacagggtttcaccacattggccaggctggtctcaaactcctgacytcagatgatctgcctgcctcagcctcccaaagtgctgggattacaggcctgagccactgcacccagccaagatagccctactttggatggaggyaccagagaaagactctctgaggaagtgacgtttgagctgaaatgttaataattacaataaaaataatgattaaaatttaacttagttaacgtgcttcctacctgccaggaactgtttcaggtgccttacacctatttatttaattttcatagtaacgtaagaaagtaggtgctattattctttcctctttccaaatgaggaaactgaggcacagagaaatgaagccactttatacacaattgcaagcacataagatgcagacctgatatttgagctcaggccagcagagactgtcctctccgctgctatgctttactgcacatgcagagccagctgtgcaaagacggagagaactgtgtttcaggcagaggccacatgcatcagtttggggccttttcaataacacttatggggaatcacttttcccacaaagtcttgtggggagggtgacccgtggctcccatctcccactgcccctttctcttccttaggctgaggaagacagatctttctgcagcctgccctcagtacagcccacagtgggtgccttgactcagatggtgcatatgctccctcctggaacttggatcttaagagatcagaatggagagaagcttcagaaggcactaaaggtggtggtggtggtagtgccctaggcagtcttctaaccaggtgatttctgctgatacagttgctgtattccagttaccaattgctgggtaacaagcaaatgataacttaagccttaaaataatgatagttattggccaggcatggtggctcatgcctgtaatcccagcactttgagatgccaaggtgggcggatcacctgaggataggagttccagaccagcctgaccaacatggagaaatcccatctccactaaaaatacaaaattagccgggagtggtggcacatgcctgtaatcccagctactcgggaggctgaggcaggagaatcacttgaacccgggaggtggaggttgtggtgagccgagatcacaccattgcactccagcctgggcaacaagaatgaaactccgtctcaaaaaaataaataaataaaataaataataataataatgacagtttgttcttgaatctgcaatttgggtggggcttggtggggacaagtcatctctggtcaactcagcaacagctggggtggctcaaagactggaggctggaatcatctgaaagctcatttactcaccttgctggtggttgacgctggctgttggctgagccctaagctgtggctgtcagctagaacacctacccatgacccctccacatggcctgggcttcctcacaacatggtagctgggttgcaaggccaagcatatccagagagaaggagcaccagaggaaagccatctcgcctttatggccttgtgttggaagtcacctagtgttgtttctgccacattctattcatcaaggcagctcctcccagttccaatagactgcaactcatcataagaggtggaaagattctggaagagcttatgggactggaaatattgctgtagctatttttggaagtatacaatctgccatgctgtttcctgctgcctgcttcttgaccctctggaaattaatgggatccagtgttccctaggtctggtctgtctcttagtatcctctccaatgtgtgcttaatttctactccccatccccttttgcttaagccatcaagagtcacttccttttccttgtgacaaagaatgctgacccatacagcactgacgtagagatgagccagatgcgtctaaggaacagagtgaagccagtgtgcccgaagtgtcctgcagcttatcaccctcttcttgacctggtcagttgccctgacctttaatccctagacggtaaccaaagaaggagattcagaggccaataacttgactctgaccactccaatatcttctcattgaagtcatctttgtagtttcttcaggcctaaagggatgtccttcagaaagattcctggcctcctattccttggtcagccaaaggaggttatgactgtttcttatgttgaaagaagcaaaggagacgagtggtgtaagtgatggtgtttcttgtattggagttctccagagaaacaaaactaacagcatatgtatatggacagaagagattgattacaaggaaccggctcatggaattatgaaggctaacaagtcccaagatctgcagttggcaagctggagacccaggagagctggtggtgtagcctcactctgaatctgaaagcctaagaaccaggagagtcaatggtgtacttttagtcgaaaggccagcaggcttgagatccaggaagagccaacgtttcagttcaagtctaaaggcaggggaaagctgagtttgaaggcagtgaggcaggaggaattccctcttacacagaagaaagtcagcctattgtcccattcaggccttcagttgattggattaggcccacccacatcagggagggcaatctgctttactcaaagtctaccaatttaaatgttaatctcatccaagaaaccctcatagaagtgtccagaataatgtttgatgaaatgcctgggcaccccatggaccggtcaaattgacacattataactgaccatcacagtgctgaatgaagatggccattgaatagaccttagaaagcagtggcagtctaagttggctattgctatttgtaaaattggtttgcatcaaacataggcatgggaggcagggagttaatattgtctaataacaacaatatttagtgagagcttatcatgtgccaattagatagatagtattgttatttctattttacagagaaggaagctgagtcyctgagatgttgagtagcttctcatagattaataagctggtaatggcgaagcagacagtgaattcaggcagtctagctccagagcccatgtgcacaaccacataaaggacatttcttttctttgcctgggacatttccccaatgtctttctggaatgagagaagggcagttcggtgaacatgccatacagtgtatgtttatgcatgtatgtgcatgtgtgttgctggtattatagcaactgtttgacacttgcacactatgtaacactgactttatttcttccctctttcaaaggcatttgcatttttagagaagtatctggagaaggcaatacttaatacagattacaggattaagtattactgtcttgggggaatttaaagtattagcaggggaacttatttggattacaggactccccaataatctctcaaattttaggatgcctccagaactggatgaggttccagaatcctgtctcactagaccaggtcaagtgacacagcccagcctagaaatttgcccctctttactcccccttctctccagaactgtcgtcaaccaagatgccaacagggaatgggttgagctcctcagctgtgtgaacccagggaggttatgcttaggggagactgaggcctttttaatctccagacaagggctaaaccccatttccataacctcagagctgacttggatagatgagagggtggtatggtggtgcacttgcatttacatttcttcttctttgttttttgctttttttttatttttatttttttttttgagacagggtctcactctgttgcccaggtagggagtgcagtcacgtgatctcagcttactgcaacttccaccgcctgggttcaagtgattctcccatctcagccttctgagtaactgggactataggcatgcgctaccacgcccagctaatttttttattttttggtagagatgggttttcaccatgttggccaggctggtctcaaactcatgacctcaagtgatccgcccccctcagcctctcaaagtgctgggattacaggcgtgagccactgcgcccggccagcacttaacatttcttgagtacccagaggcaggaagtgggagtggtgattgggaatgaggaaaagatgttcgttattattacttccatttggcaatgtactggagcttccagtgaaataaagtaagaaacagaaattaaaagggtaaggattgaaaaagaacaactaaaattgtctttattcaccgtcgatatgattatgtacaattatagaaaaatccaaaagtatctaaggatagttagtaggattaataagtgaatttagtaaaattactggatataaggttaatataaaagagtaatcatatttctatataccagcaacaaaaagttttttaaataaatttaaaagataccattacaacagcatcaaaagtcatgaaatacttggaaaaaagaatataacaaaagatgtgtaaggcctctacccagaaaacgataaaatattaatgagaaaaatgaaagatctatatagttgaagaaatatatcaggttcatgaattggaagactacaaattgatctatgggtgcagtgaaattgcaataaaaattactatccatccatctatcctaaaatgtatatggaaatgcaaaaacccaaaagtagccaagagtattttaaagaagaacaaaatgagaagacttcccctactagatatcaaggttcattataaagctatattgattaatatgatgaggtgtgccaggaggaagataaggccaatggaacaaaatggaggccagaaatagacccatggatggatatttgatttataataaagatataattaagattttttaaatgaatgatgttgggtcagttgaatatccacagaaaaaattaaaatccggctgggcacagtggctcacgcctgtaatcccagcactttgggaggccaaggtggacaaatcacctggggcaaggagttcgagaccagcctggccaacgtggtgaaaccccgtctctacaaaaatacaaaaattagcaggcatgrtggcaggtgctcgtaatcccagctggggaggctgaggcaggagaatcgcttgaaccctagaggcagaggttacagtgagcagagattgcgccactacactccagcctaggtgacagagcaagactccgtctcaaaaaaaaaagaaagaaaaaaattaaaatccaaaccgtacctgtgaagaaaaacgtgactccatcttggatgctaatacaccatgttgacttctgattaaccccagtcccatgaatgcctcctgattcctattttatttactgtccttagtgtgagaacatgtactcactataaatcctggctttaaatcaaagcaactttgatattgtcatacaaattataggctatgacacacacagcattctttcctgttccacagggttgcctttcattgtctttatggatcacatacactctttccctatggtatataagctctgatttgcctttcattgtctttacggaacacatacactctttccctatggtatataagctctgatttgcctttcattgtctttacggaacacatacactctttccctatggtatataagctctgatttgcctttcattgtctttacggatcacatacactctttccctatggtatataagctctgatttgcctttcatcgtctttacggaacacatacactctttccctatggtatataagctctgatttgcctttcattgtctttacggaacacatacactctttccctatggtatataagctctgatttgcctttcattgtctttacggaacacatacactctttccctatggtatataagctctgattttagggagtaacagttgggaaatctacctgtctcgctgccacctaagactaggcttctgtacatgagttctctaataaaccatcccttactcaccaacgagatttgtctgcctcattctttggtttattggcttcttttgcattcgtgggtcactttgcatatccagccctttcacagaacaatcgggggtcactttacctatacggtcctttcatggaacactaccccacagcattcacaaaaataaattccaggtggatggcaaatctaactgtgaagggtaagacaataaagataacataaaaaaaaaaaaaactactaccttagaataggaaagatttattaaatgatgcacacaaaaaagcattaaccataaaggaaaacattaataaattgaactacattaaaatttaagacattgtgttaatcaaaaaacaccactaagaaagtaaaaaggcaaactataaaaagaaagaaaatatatgtgacacataaaatggatggaagtttatatccaatagacgtctataaagaacacacagctcaattaaaaatgggttagacacttaaaaatgcactgtgaacaaaatttcttagaaaaggaatttggaggaaagatacttattccagtgaaaagtttgcaaactgggaagacacaccctgcatgtaaaatgaagatgctttccagagaacaaagggaaagcccaggttttatagcaaaacttcccaccccagttcccaattaggtccatttatgcaaatgaaggattcaaacttgctttgttctgattagtcaatacagttgagccctgattggtcaaggcagatgacctctgattggttggttcaggtgagagctgtaagtcccaaagttaaaaaagtgtgagcattctgggaatgcagagtacacgtataacctctagtcagcaaatg

SEQ ID NO: 95894 - DNA, 248075 bp, Homo sapiens
  misc_feature (1)...(248075): n = A,T,C or G
agctctatgtctgtataggtgtgtctgtgtgtgtgtttgtgtctctctccgtgtgtgtagccattaagctctttttggaataaaaaaattgcaaaatgaatgcatgatcaccagcatcttggaaaaacatgaaacaatatggaaatagttggagtaaaaggtgcaagtcctcccctccccctccccccacctccttccgacccaggaccagctacataatttgtggggctcagtgcaaaatgaaaatgcagggccctgtgttcaaaaagtaggggaaagtgtggttaaaagtgctcactttctcctgcactctctctccgcctgtcatggtggttttatttcctgtgtaacatcgtgttcctttgggcatggggatgcttgcagggtgagtgcagactcttgcaagacgcctgtcttctggccagggacagggaagttgagtgtcgagtcaggcatttccccttcccacaggtccacaggtcgatgccccaatccatggcagacaggtaccccacagggcattgcagccttggggttgagacagttggtacctgatgttcctgctgaactgcccaccgaacacacagtggcactgccagcccagggaagggcggtcaccgccatgatccaccccaggatgcactggggtgcatacactcctagacccagacccctgccaggggaggagggcagcagtgacactgagacaaggcacaaagaggaggaagggtggggtccagggtgccagaggccaggggagcagtcagctgagaacccaggttggggaggtggcaggaggcaggagcacacgctccatgctcacagcacaggctctgctgttccatcagacattgcttaggaaacacacattcaaagattcagctgtcaggaattttatgactctgcagagccttaaaccccaagcacgagccccttccaagcatgaggcctgtgtggctgcctgggtcacacacttgtgaagcgggtgcagctccaaccccatggctgtggataggcacagagctccagtaacagcagccaacactgagaggtgctttgtaggatccagggacgcttccagtgcttcctaggtatgagctgctttccttccgccacaacctggtgaaatgggtgctcttgttggctccgttttactgaggcacagagagattaagtgatctgcctgaggtcccacagctgttagtggcggagagcctttcagtcctcccccaaggcttgtccttggtcactctaccccaccacctctcaacaagggcctggagctcactgctgctgtcagaaaaaaagcaaatcttatttttttcatttgccagtatggaaacgcccctggcttggagttgcttccagaagaacatagaagttccagcccttagtctggtagccaagagcctgggtgggctgggcctggggggctgtgcactgtcccctgcttgccctcctccaggagggtcttgcatgggtcttgcatggggctgctccctgccctggggcacccctgcccctgccttgcctggctaacgcctgcatagccttcaagggccccaggatgcctcttccttggtgggcttcccctgtggttcccccaacaccttaagggacatgtcaattttgacgtggaatccccagggtttgagttgccccttggggtcacacaccacatgtttgaggagtgaatggatgaaatggcctgaaatctgattagcacatggaacacagttcaggaagggagctgtcttagtccgttggggctgccgtaacaaaacaccatatagcctgggcagcttatgaacaacacaggtttatttctcaccgttctggaggctggaagtccaagatcaaggcgtggcggattcagtgtctggtgaggacctgcgttctggttcacggatggtgccttcttgcagtaccctctcagggtggaaggggcaaatgagctcccttgagtctattttagaagggcactaatttccttctaattgtttccccagggcccggctcctcatatctcacattgggggttaggatttcaacataggaattcagggggacacaagcatccagtccacagcaggggggattttggaggaagttatgcatggggcaagaattgggttaaggtgttgggagtgtagttggcacagtgatcacagatgctgcgtgttgcaaatttgcagccctgggtgaagtttaatctctttgcctctgttctgtgtgtgtgtgtgtgtgtgtgtgtgtgtgtgtgtgctgtgtattttttcagaactgccatttattgggcacttctgtgagcctggcactgcacgggcactatgcactatacactctatctcacttatcctcaagtcaacttgtgagggtgtggacgtgcccactgcccccggttttacagaggagcacactgaggtgccagtgatgtgctccaggctgcttagcagtgagagatggatctgaacctagttcttcctgccttggctggactgcgagctgctctcccagtgtttaaatttaggttctgttctgtgattccttctcaggaaactgctattgtcagggctgcctgctcatcagagcccctgtctcagcgcagtgttcccctggcattgcagagccacagagctgggagccactgttgctgtctttcctgtgcactcctggctggaggctggtgtcccatcagagcygcagggctgggtggtgaattcccaggatgggcacctgtgagggtgcaaggtcagaaaaaaagatgacgctgggctttgggggctgtgatggagactcactgggtggggcatctttagatgggaggccaggcagggagacactgtggaaatcctttcctgggtctggagtggaccggttgcccaggtcttcattccaagcttggctcggtgcagggctccatgttgagtggggtgtggcttcatggtggggacactgttgcactctttgctggcactcctggtcagaggatggtgtccatcagagcctcttccattgtgtagttcctggctgccaaagaatctttctgcggcaagaatctgaaatccaacctagtttgacccaagcacagagttgatcaggctgagtattgggaagttcaggggatgccctgatattttaggaggctgagcacaggtggccttctccttgttaggaggcagccagaggtggcaggtaaaggctcacacacctgcaggtcccaggaggagagaagagggctctttgtaagccctgagaaaggcttctccttgaccttgcatgggtggccttcccactgcaggtacaatttccctgtccccatggatggctctcccaagcaaggggatggggccccttaagtgacagccccaccagcaccccaggtcacagatggcagctgagagtagtgttaatcttcttagctggcacttatggagaacttgctgcatgcttggcacaggcagagcctgttaggtgtatcaggcgctcactcggtgttgggatgcgatcatcacagccactttgcaggtgatgctgtgacatgtggtgaggttgggagaagtcactgccccaagtctcaccgccaggggctgtcctgctgggctcgggcacctttaagaggatgggtgctgaggctgctcagaagcacctggccgcctccttcctcctgccttcctgtccacaggggaggaggagaggtctggggtggggctggggagggtttgcctggagtcacgcagcaggtgagagtagaaccagggcctgtgggatgcacctcactccaggccagcgtccgttgtgcccgcccatgtcatctgggtctccagtgcccaggtggggaatattctgcagtagctcaccctcagatctgcctcctctccttcttcatctctactaccccaggtcaagccattgtctcctcttctggactacttgagggcctcccaatccagactcccctttcaactccctaaaataaccatgctgacctctgctgtgcccatctccacagcgctcactacacagcagcctttttcccgaccttggtacatcctgggctctctcctgtcccgggccctttgcccctgctattccctctgctcctggtgctaacccagcactcactctaactcatccttcaggtcgcagcttccatgtcctctctccagagaccttccttgcctcccagctaaatacgtcccacccagggagtctccatcactgtactccgggtccaacgtcatcatcttttcttttctttctttctttcttttttttttgctgaccttgcacccagcatctcctgactataagatctgtaagaactcatctgtgttctcggagcctggctcatagttcctgttgttgtagatgttgttgtcctaatgcatcaggtgtgtttggataacaccaatgagtggttcaaatattcttcccagattctaatgtcagtgctgcaggaccacaatacagtgaatttaaagtgactatttctactctttctcaggaaaggaacctattagcaagtacagtgtagttaaaaatgacctccttgaaggctggtaccttgaatcctcctcggtatcttctaaggaggcttgtaccccttgttcctttccagccccagcttctctctgccctggtctgtgcctggaacctgatcctgtcaaatttaccacctggatctctgccggggagtctttgggtgggttttgcccacaggaggcattgccaggagctgggagggcaggtggagagagaagtagggttgccgcctccttcccccttccctcctttggaggagggtgcagtggctgcatccttctgtgataataaccaactcaggggcaccccgagagatgcttgcagattctcccaggaggcaaaacttcagggggagaatctggttgctcatgttgctggggaggaaccacagcctggagtagggatctacactartgcatgggttggcaagctgggcagggctctggaaagaacaaggttgcaggatgatgacaaggtggcctggggaagaggtgtgtggatggacctctcaaatgactgcagagcatgaggtatttgtgccctgtagtagtcagggttcttcagagaaacagggccaataggatcactgcacgtgtgcgcacacacacgcacacggaattggctcaggcagttatggagctgagaagtcccctgagctccatccggaagctggagaactagttgttctagtttgaaggtttgagaaccaggaaggctgatgttgcgatggtgtgagtgccaatcccagggcaggagaagactgatgtcccagctccagcagacagacagagagagtgaattctcccttctcctgcctttttgttccattcaggccctgaacaaactgggggaggcccatccacagtgggattacttagtctactgattcaaatgctcatctctactggaaacaccctcacagacacacctggaaatgatgtttagcatgatatctgggcatcccgtggccccgtcaagttgacacatggaatgaacccccacgtgccccatgcggatgctccccagaggcatcyttcacgcaggaggctctcggtcacaggatagacacgctagcctgcctgtgggtgctgggcagactctttccagccaccccagggctcactcttgggctcacacacaaaatagggcagagatggggaaacacacaggcagaaaatatggccttcaactctccagggctgagctggccactgccacagctgaggtcccagtctccaacatcaggggacaacagtgactttgggtgtggcagcattacccgaggagaccagcaagcacccgggggcaggttggttcccttgttctcaggggggcggatgcataagccagatacagaatcgccttcccacccgcttctgtcagcagtgtcattgtggaattcctaattcacagtcaccgtcgcccacaagcatcacatcattcaaaggattcctgcggtggtgcagagctgcggcaaagggccctcgcccgtggggttcactctcatcacccagaagcagggagaagggcctgcggctgcaggcctggctgccacaccggcctccagacarcacacagcaggtggggccttgtcctgtatgccttagatcagcggctgactgttttgtgactgtcacctgcacagccacatacacaggtttgaggaccagtggatggagttaggaggagcccttcactggcttataatcactagggtgtcaaataatttatcatccaaagtggggtaccttagagaatgaaagggtgtgttatgaatgattgcacagggcagccccagacgtggccactgtgttagtgtgttggggctgtgtggtggtctgaatgttcccatctctccagtagtcctgtgctgaaatctacccaccaacagagtattgagggtggggctttgggaggtgattaggtcaagaggtcaagagggtggagcccttataaaagaggccgaggcagatatctaccatgtgaggacgcagtgagaaggcgccatccttgaagcacagagcccttgtcagacactgaatcgaatctgctggcatcttgatcttggacttctcagcctccagaattgtgagcaatttctttttcttttcttttctcttctcttctcttctcttttctttctttctctttctttctttctttctttctttctttctttctttccttccttccttccttccttccttccttccttccttccttcctttctttttctttttcttttttttttttttgagatggagtctcactctgtcacccaggctggagtgcagtggcatgatcttggctcactgcaatctctgcttcctgggttcaagcgattctcgtgcctcagcttcctcagtagctgggattacaggtgtgcaccaccaggcctggctgatttttgtatttttagtaaagacagggtttcaccatgctggccaggctggtcttgaactcctgacctcaagtactctgcctgccttggcctcccaaagtgctgggattgcaggtgtgagccactgtgcccggccagtgagcaatcaatttctgttattcataaactactcagtctaaggtatcttgttgtagccgtctacagactgaggctgccttaacaaagcactacacacagagtggcttgaagaaaggaaattgattgtctcatggttctggcagccagcagtctgggacgaagacgatagctgggtcagtttctatggaggaattagagggggaatctgtcctgtacccctctcccagcttattgtgatttgctgtccatctttggcattctttggcttgtagatggtgtcaccgtggtgtctgcctttctccctgtgcytgtctgtctctgtgtccaaatttcctctttgatgagggcacccgtcattttggattgggggtaaaccctactccagcatggcctcattttaactaatgacatctgcagtgaccctatttccaaataaggtcacatgctgaggtattgtgggtttggacttcaatgtgaattttttgtggggagagcacacagttcaacccatagcagtcaccccctgataaccccttgaactaattttgcttctagttcattaggcgtggtgtgtttgggggtcctggtgccccaagaaggaaggcttccatcagggagcagggccacagtctgtgaaagtggacactgggaccgaggccatttggactcctgctgctgctgggtggcctggtagagaagggggcactgggatgaggggtgactgctcctagctaccaaggataaatgaggtcacttcttggtggtatctggggcccagaggatccacggggatgcttcttagcactgacatctgataaaaaaggtctactgagcatggcagccctgaacatagagatgggagcatgacagacccagatcatgggtgaaaacttgggtcgttcccccaggtgaagaaccaggtgctctggcacaggcaaggtgcctatcggtgggtggaggaagaaggactcgctgctgattggccctttttcccctgccctcatctctcctggccaccttgaatgaaggctacctgtggtggacagtgtggtgctgtaggctcaaggcaggcatctgaagtggcgtctccctcaatgataccgttgctggtgggaccccgtgccttactgtgttgggctgagagtttcttcccggatagggggacgaggatgtttgctgagtggccacagtggactgcgctggatttctccacttgacccgtagatctatttttcacctctctgtccagtgtggtgccctggaggctgcatcacctgtggtccctgccctaaggctcccgtggagtttggccagtgggaggcaccagtcagagcttgcagggcaggagggagagggggaacactccccgttcttctccctgcggtggcgctgcaatcctagggtcggctgtgctctccatggtcacagcttgtgccagtggatcctgtctcatggtcccagttctcttcccctgcacctttcagcccagggagtaacagcctcctgtccttgcccttagtccctatgtgccccaaatgcttccttggtcacttcctgtaggtcacctctttgtttacttctcttctgttgaactatctggggtgaattctgcctccagtgagaccccaacatctatggaggccattggaactggggcatgtgtgtggccattcatcctgaaactggctcttgcctctgctactcacatgacatcaggcaatggccccaccttcctgagccttattgtcaaattaggacaataaagtccacttttgcaggatgtttgtgagtgtagtggaaagaataatgccccccaaagatgtccacattctaatccccagacctgtgaatttgttaccttacatggcaaaaggaagtttgcagatgagattaagttaaggctcttgagttggggaggttgacctggattatctgggtaggcccaatgtcatcacaggggtccttataagagggaggtaggagggtcagaatcagagaaggagatgggatgacacaagcagaggagagaaagaggaagagagggagaagagaagagagggagaaagaaagaggagagaaagaggaagagagggagagagatttgaagatgctgagctgatggttttgaagatggagggaggggtcatgagccaaggaatgcggacacctccagaagctcgaagatcaaggaaacggatcctcccctggggcctccagcaggaaccagccctgcccacaccttgactttagcccagtgaggctgatttcagacttctgacctccagaacagttagagaataagcttctgtttttctaagccactatggttgtggaaatgtgttacagcagccatagggaacttacacaatgagaacaaatgaaaaaattgcagggagactgcctgcatttcagagcaggtgccatggaaatgattactgcatttgggaacagtgggctcaggtctccccttgtggcaaaagtggacctgtaggctcagatgtgtagcacacacagcacctgctgtctttgctggtcctttgctgccacttgtctcatcttcactcacatcatcttttccttccacttccaaagtctctccactttctctccagttatctgtggcttcctaacaaatgatcccatgatgtgccagctgagaatggccatttcattgtgtttcatggttttaagagccaggagctgaggaagggctcagctgggtgattcttctgctgcatgttgcctacaccgaggtcgcttgttggtgttcagctggaggatggactgggctgggtggcccacagtggcttccctgtaatttatggtgccttggtggggacagcaggggctgagctcagctgggactgtcacctgagccctgacatgtggcttgtccagcatggcagcccagggtggtgggactccttccatggtgctcaagtttcctggtgcaatgtccagggaacaagatggcagttgtgtggcctttgatgcccagcttttggtgtcccagagcttcatttctgctaggctcttggttgagtgggtcacaggcccaccagactcaagaggaggaggcatagacctcatctcttgatggggggacttgtggccataccacaacactttacctctagttttattttctccttttccagctgggagtttcagttacttttctcccactggactcctattggctttgttctccatgccacgtgtttgttcattcattctacaaatatcacctgagcacccactgcaggctgtggtctgtgctggaaacccagagagcacattaggagcatgtgacatacatgagcactcgtgacttgccaggggctttctaagtgccttctgaggccaagtagcctccaatccccctggaaggcaggtatgtttcttatccccagcttacacatgtggatactgcagcacaaaaggggaagaggctcacctgtggctgctgagctaacctgtgggagagtgggctttgagctcgggcaacctaactggagaggcttgtgcataaccaccaggctccatggccccggaggcgaggaaggtatggcaattgacctccaggaggactctctttctagagagagaccaaaacaaaagtgttgctctagctgggcactgtggctcatgcctgtaaccccagcactttgggatgctgaggtgggaggatcacttgaggtgagtaattcaagatcagcctgggcaacagtgagcccttatctctataaaatattaaagaaaattagctgggcatggtggcctgcacctgtagtcccagctacttaggaggctaaggcagaagtatccattgagctcaggaatttgaggctgcagtgagctgtgatagtgccagatgtggagctgtactccagcctggggaacaaacaagcaagactccatctctaaataaaaaagagtgtccccctaagatgctctgcgaaatattgtagactggttgccctggagcctcatgcagggagtgaggaggggccaggtctgtctgtgcttcccagagtagaagatattaagctagaagaatgaggggaaagcattcccggcagaggaaacagcacgtgtttcrggttggcgttgtaggagtgcatggcttgttrgtgaagggtgaagttctgtgcagctgggcgtagccttcccgggaggaagcagtgagagctgaggctgcagagggtagtgggggtgtcttggcaagggtctcatgtgctggcctgagggcactgtggggagggggcagacttggtaactgggctgggggctgattgtgtctgtgctttgggatgtgccggctggtggctgtgaggaggggarcaggaagcttggaggtggagaaggtgggttgtcatccatctcattccaccagtgggggacggggaggctcagagaggctgagtgactcactcaaggtcatgcaggcagtgagcatggaggtgagactggggcccaggcccgtgggatgagccattggctgtccccctacccygctgtgacctcagctgcacctcgtgctgcggtgacaaggtgacaggttaaaaataaagcactgtggtgctgccagacctttattggcacagggtgagggctggttatgtcactttaaagaaatacttctctgcaagcatcagttgagcatgtttctccccagatattcacctgggaactgagtctcgagaaataacgttcgttacagctgctgtcccataaggactgtcagggcaggctcaatagtggccaccactgaataagtgcctactgtgtgccaggccctacgtgggaaagtagctcataccttaaagctcatccgtgggctccagctactgcccgtgctgcaggtgcctcccgttatcctccctagggatgaggaggggttacgtgaggtcacacagccagcaggtgtcatcagagcccactgctctcagggctgcaaacctgtggccactctacaggagcaggaaggagccggtgttatcagtctggctctgcaggtggagaagtggagggtcgtgcccaggaaggcacaggtgaggggcatttcactcctgagggcctcaccttctgtgattctgcctgggactcccttccctgtatctttgtcattattcaggtcccagctgaaaagtcacctcctcygggaggcctccccggaccaccctccatctggagttgtcygtcactggatccaggtgcaaagctctggaatgaaatgagcctggcgtgttctgtggcagcaaggaggctggtgtggccaaagcagagagtgggaagggtgggggtggaggtggaaaaacgacgtggtccaatttccatttttacagcgtcagtctgcctgctgtatggggcatggactttgtggggggcaaagtgagaaccaggggatgactttggaggctactgcagtgtaggagtgagcaatgatggtgkcttagaccagtggcttagctccagaggtctggacaggattaaccaatttattcaacagatatttaccagacaccttgcacgtgggaggaactgagccaatgggggatctgtcagtgaagggacaaacacataaacattcaagagcatgttggggtgacagtactgctaagagggaaggcggggagagggctgccaagggacgggcactgttcatttagggaggtgggcagaaggaggtgcgaggctcagatcccccttcaagaaagactttgctgtccagcctcagggcaggcagtcgcttgactgcctctggattttggcatcttcaggatctgcctctcccactgaaccaaggctgttctttctggcagccctcagccaatgactgccccctggagggatttctagggcctgcccatttctgcacacaccaggactctggcaggcagcctttgccctggagcttgctgtcggttggctgagagggtcagtcacacttgcatggctgtcgggaagctctacctgcccacactggctcttctaccttttacctttaacaagtgtgacctcccaataaacctcttcactcctaactgactcagcatccaaatacagggctgttttcaggagtcgctgtgctgtctttgcatccacagatgtcacgcacaagggttccaggcgctctgcaccctcatcagcccttgtgtctgtgctttgggatgtgccggctggtggctgtgaggatgggagcaggaagcttggaggtggagaaggtgggttgtcatccatctcattccaccagtgggggaccgggaggctcagagaggctgagtgttagccatcctaacaggtgtggttgtgccccattatgacttcttcttcttcttcttcttctttttcttttaagacagagtctcactctgttgccccggctggagtgcagtggcatgatcttggctcactgcagcccctgcctcccgggttcaagcagttctcctgcctcagcctccggagtagctgggattacaggtgcccaccaccatgcctggttaatttttgtatttttaatagagatggggtttcaccacgttggccaggctggtctcgaactcctgacctcaagtgatctgcctgccttggcctcccaaagtgctgggattacaggtgtgagctaccgtgcctggccccattatgattttaatttgtaattcccccatggttaaaaatgttgagcatctttttatgtgcttatctgagacttttaaaagtctcatggttttaggcttcacatgtaggtgtgtgatctgttttgaaccaatttttctctgagatgagaggcctgtgtcccgttgcgtttttgcatatggatgtccggttgtttcagcaccactagctgaaagatcaccctttgcacctgccccaggcccattgcagacgctgggtcctttatcctgtaggaggtcctgccttctgggtgtatctatggcttccctgtggtgtccctgggcacttctctcctgcccctctattttcataatcagaaatccgcagagcktttattagattgagcctcaggcctgtttttcttggcaggaatgcttggttattggtgaggtgggcttcccagtgcatcccgccagaaggcacccagtgtccagtgttcccacgggtactggagcacagggtgaccagtgaggtcgagggcgagaatctgctatttccttggttagcttccttatcataccttcttatggtttcaccgagacactcaggaaagttagattagggactctactagatgattccaagaagctattgttgctttgttaggtgtgataatggcattttggttatgtaaggaagtgcccatatttttagagatgcatgctgaagtgtaagggcgtgattttactttaaaatctccagtgaagaaaaaataggcaagagaaaaaaaagggagagatgaagcaagtgtggcaaaatcttgataatcgccgaatctgagtgactgcatgttttgaagatgagtaaatgttttcagaggccgaggtctggcttgcacaagtttcccccaaatgctcccccaaccccaggttatcaggtgaatgtgagccgctgggagcatttagaggctgtctgctacctgtgcttgggggccattagctgttgctcttcttcccgtctctctttcctcccctctttccttttctcccctcttccatcttttgtccccacccttttccaaagattccgggctgaccctcggcagagcccccgcttcacggcctgccctttttcataaggaccaccagagggcgccatgatttaagtctgtcgctgttcttggtgctgaaattctgacagcgggtggagcacatgatgggcccgggagctcctgagggcttcagccctgttttctgttcctttgaaaacgaacacacctttgggtctaagaaatatactgttttatattcccaatatgtggtccccaacctttgcatccctgaggttggaaagagaagggacggctgagatgcttagtgaagggtgcaggcctgagaaggctttgtcagaatctaccactcaccagctgtgtggccctgggctagtcattgcacatccctgagccttgattttttctcatctgttaagtgggaatgataaccacagctcctttaagaagttattgtgaggattaatgagatgctgcagattttagtaatctcaagatactattattcctattgctatgaccactactaatactttttttaaagcacatgctgtgtgtcaacggcccctccagtgcaccccctcccaggtgtgaagtcaggagatgtgatgtccaactcaaccctgccttgcccgtgatcaccggtttgactctggctgtactgcagccacacttgaaaccttttgccttcctcttatggaagatcctgaccataaacctgaccttgcagagttcccatggatatgtctccaaagctctgaatacagtggccagtgcaccattgatgctaagtcagcgacagctgctattatcgttctcagggcccttctcgtttagccacgtgttgattctgtgctttgtgggtcccaataactccatctctccatgcttctctggaaactgccccacgcaacccccccaccccccacccagggaactgtggtgctggggcattgccttccatagctttctacctctattcccacaaccctttgtagctaaatcaacagtagatgttggtcagcgaaatactgattttgctacaatatcttgcttgaatccatgtgatggccctaagagagaagcaaacgttgccttactgtgtttaccttacagctgaagaaactgaggccctgaagaatgaaactgcccacccgaggtgccccagctaacaagagtcaggcagggaattggggattcttagaaaaagagggttgctcagagattctataggagaaactgatgtcagagaggtgcagccactggttcagaatggctgagtgcattcatgtctgagcygggatgggaaccaggccccctgaccttgtcccagagcctcttccttggtgtctggttctctgccttgagcctcatgggtatcatggaaaagagacttatgtaaaagaaacatgcctggctttatgacacctgagacttaagacagtaatttttggtgattagtcttctggcatacctggtccctcatggcctgcaccttttaggcatttgattttgtactcacttgtgactctaaagcaccttgttagtggaggtaaattaacttattgattttgagctccactgctactatgataaattataacacgatttcagtcattttgttgtttacttaggcagttgttgaaatactggtgcgttggtagaacttctgaaatgaatttttaacaaatccctaaaaactatgtgagcttttccaaaatgtctggaggaggcaataggcctgactttttcattaataacgtatctcctggtgctggtatggtgagggtgagcccgggagagccccaggctgtggggacccctttgagaaccggcctggcattaggcagcaggcactggaaaaagtcgtcatccttcctgacactgcatttacactcttggggatttatcctgaggaaattataaaaaaaaatttaagaaatctccttctgcctaaattcactgaagaattatttgacagtaggagcaacacaaaataaacctggaatcaacctcactgtgcagtgacagggacattgttttccaattgtagcattggtttgcttctgggagtttgtgctaatttgcttctttggggcatccacagttgcagagcacagggagaagggtgttagctggccagcagtttytatttcaagaggaagactcttgcttatgcttcttccttttctgcccgagcacagggggacactttgtgcaaataatcacatacaatttaggaatgcttttggagccgggtgtgctggcttattcttgtaatcccagcacgttgggaggctgaggcaggaggatcacttgaggccaggagttagagaccagcctgggcaacatagtgagatcccgtctcttaaacaaaaattagctgggcatggtggcccacacctctaatcccagctactcaggaggctgagttgggaggatcacttgagcccaggagtttggggctgcggtgagccgtgatcatgccactgcactccaacctgggcaacagagcaagaccctgtctctaaaaataaaaataataatgataataaaccaggaaagcattcatctacaagtaggaggaaaattgactagagggacttccggtagctggaactgaaagagatagggctgcaaaaacattttcaccgtaaaaggcaaggggtctgccatccagagctcatggcttggctgggtgaggccaacaggaaccaggctccactgtctttctgctctgccaagctcagccttggaccagaccctctttctttgagtctggttcttgtccttcagtaaacaaatggggccagggtgaggatggttggggtaggggacactgggcttctttttcccctccttgtgggcagtccactctggggacttgagcgtcttccatggaaggcagatccttggatgagtgaaggctgctgtgttgacagctcagctcgggggccgaaagtcagagatgagattcctcatgggtgttacggagagcagacccacgtaaaagaaacatgctcggctttaccacccccagtactgcttggggctgtatcttaggtgtgggtttcttgctcatggtcatgaggtggcaactggatgtccaggcctgggatgtgaggtcataggtagcaggacgggcagggcaagggagcctgtttcctggcactccgcgctcacgctttatgtgacaagctgggtggcccctagctgcttctccgtctccatgtcagccgcttggttaagcatggttctcaggggtcccttggccagctgtcctgctagcagctgacatcaggggagaggccagctaatttttgtatttttagtagagacggggtttggccaggttggtcaggctggtctcgaactcctgacctcatgatctgcccaccttggcctcccaaagtgctgggattacaggcatgaaccaccacgcctggcctggtatttgttgttgtttttttaaccattgccatttttttttggtgaccatgttcattggctgccctggttggcccataggaggcagaggctgagctgggtggaattcagtgtgtggggtgtcgattaggacgtgctcttggggtccatgcctgattgatgagggaaggcagcaggattgggcagagggagagctgagccgagttgtagtccagtgacagctgtggctgactgtgaggagctcaggggctgcggtggtgcatccacgccgtcctgccttgggcccagatggctgcttcttcacgcttgcccagtcacaggaggcgatccaccctgcaggtgtctcctgacagcaccccgcctgctgcggcaaagatccctccttgcggggcgtctgggtggcccctctctgagtccactctgttggccaaacatgcttctgttctttgaaatgcaggcctccctgctttttttcctgttgggttgtcttccaaaaattgattacgacaattttgtccttctaatatattctgcacatgaatcctgagttcaaatgggttgtmaatatctaaggttgtggctttttcacttaaactttacagtggaagcacaaagtctggttttctatttcttctcgtgtcagtgttagtgagctgtatttttctagaaatttatctgtttcttctaagttttcacagtaatctagcatgatctttttttctttttctttttctttttttttttttttttgagacagagtcttgctctgtcacccaaggggagttcagtggtgtgatcttggctcactgcaacctttgcctcccaggttcaagcaattctccctgcctcagcctccctagtatctgggattacaggtgcctgccaccatgccaccatgcctggctaattttttgtatttttagtagagacagggtttcgtcatgttggccaggctggtcttgaactcctgacttcaggtgattcgcccactttggcctcccacagtgctgggatacaggcgtgagccaccgcgcccaaccattctcgcgttatcttttaaatctctgtaatgtgttctgtcctgtcaaatgcattcttccttagttaatgttgttggaggtttgttgactttattaatctttttgaagatgatcatgaggtttgggggagcatcccctaggcataggactggcttctgcctccagtgtggcctctgtctgcggcatgccttgtttagtgcagatctccaggggttattgttgggcgaccagggacagtcacagcacctctctgggcttcagtttgttcacatggtggctgggagtgagcgcactgctccctaagctctgtagaatgtcactgtcccttttggagggtactgtggtctttcattgtgatcacgagtgcatttgacttagctcctggataaaggacaggaatttgtcatgaatcccttaaagtacttggcagcttagcccatgctaggtcttcgagaaatatttgttagatgacggaacctatgcagcgagggaatcagtagctcagtcagcaatttcctgccttctcagggattccacttggttcccctcctccctttttttaaagttagaaaatgactcacatggctgggcacagtggctcacacctgtaatcccagccctttgggaggccaaggtgggtggatcacttgaggckaggagtttgagaccagcctggccaactctactaaaaatacaaaaattagctgagcgtgatggcaggtgtctgtaatcccagctactctggaggctgaggcaggaggattgcttgacctgggaggcagaggttgcagtgagctgagatcgcgccactgcactccagcctgggtgacagagtgggactctgtctcaccaaacaaacaaacaaacgaaacaactcatgatcccctgcgagggtctggtctggtcagggcagggtttttgaggatctgaccactctgtccacctctgctccagcgctcctgtgtgacagggaacctatgtggtggacagcaggcagagagaaacagatattaattaattaattaattaattaatcttgacctgtattctagtaactcccaaatgctgcaaccctcaggtggcagctattttggagaatggaggataggacagtgctggttgtcttcccaatatccattcttcctggatttctggctaacagccctgacttaaatcagggggctgtgtgtccagctgaaattcatattcccaggtctgtaattcagcagaggtggccatgggaccctgttctaaccaatgggacataagctgagatcactgggtggggcttttgggaaagatcctccacagagaatgactcagctggcccctgccctttcccttgttttcttcttgtctggaatgtgatggctggagcaatggcagccattttgtaatcatgaagtgacttgaggacaccatatgctatggatggagaagcagatagacagaagggatctggagccttaaccacaacacagagttctgctccagtgctggattgctggcctctggctttattttataaaagagaaaaaccctacatttcttcctagctttctaacacagctcctaactgatacaggctgggaagcccaaatggagatttttgctttcttcccatgtatccccatcagtctctccctgatgcacaaggaaagaccattctgagcacacccatcttcatgcagaaaccacatgtgtggagcccttatgcactgtggtgggaacgtgaaatrgtgtagccactttgggaagtagtttggcagttcctcaaaaggttaaacatagatttatctcatgacccagcaattctactcctaggcatctaccaaagagaattgaagacatccatccatacaaaaagttgcacatgaatgttcatagtggcactattcatagtagccaaaaatgaaaacaacccaaatgtccatcaactgatgaatgggtaaacaaaatatggtctatccatacagtggagtattatacagccctaaaaaggaaggaagccctgccacacgctacaacatcartgaaccttgaacacatcatgttaagatcatgttaagtgaaagaagccagacacaaaagaccacatagtgtatgattccatttataggagatgttcataatcagaaaattcatagagacaaaaagcagattagtggttaccaggggctaggggcttggggaatgaccattaatgaacatgtggtttctttttggggtgatgaaatgttttaaaagtaaatcatggtgagggctgcacagctctgtgaatacactaaaactactgaattgtacactttataaaagtaaagtgtrtggtatatggcttatgcctcaataaagctgtgattaaagactgcatatgctttaaagtgagaagcktggtgtcattggagccaggcgacagagtagggcagggctaactgcagggtcctcacgggcctggggcaggtggccacgtggccagtttctgccttctctagtggaatagggtggtgtggtggttaggacccagacccctctacccacacagctgcacgggcttggggagatctagtttctgtgcctcaggggcctcacttgtcgtayggggagactcctgtatcgcccgcaaggttgtggtgaggctgagcgagggtaatcgggaatgcctagygcagcttccrcctgcagggacactcagcaaaccccagatctgattcttccatttccccacgcacttgccacccttgaccactgcctggtcggcaggcgcttctgtagtctgggcttgagaagaactttcagaatggtagattttttatyctttattttttgaaggggagaaggaaagcagtggcaggaatcgtcctctgtgatgttacaacatattataaagctcagtcattgaaatagtctggaagttacactagacttgggagagagaccggtgaagcgtgacacaatacatgtgtgagtgccctgtggccgccagagcaaagtccacagactggctggtttaagacaacagaaacgtattgtccccagttctggaggctagaagtccaaggtcacagtgtgggcagggctggtgccctctgagggttatggggggaatctktcccagcctcttctcctggcttctggtgttttgcccacaacctgtgccactccctggcttgtggaagcctcatcccaacctccacctccatcctcacacggcactctccctatgtgtgtgtgtctgtgtgtccaaatttccgccctctctctcttttttttttttggaaggacatcaggcatattggattagggactcagcttaatgacgccatctcaatgcatttcatctgcaactaccctatttccaaataagatcacatcctgaggttctaggggtgaagactgcagcatgcagattttagggggaagcaatctagcccttcctggtggaaagtcagaagcaggtttgagctgtataataaatcactcactgtgtaacgggctcgatatttgtggagcacctgctctgagcaggtaccgggaaacagcagtgatacaccgacaaggtccccgcccacgagtagctcaagcagcagggccgggaggacatttcatgacggtgcgggggagcggccagctccacgcgtctgctgcctttgtaacgagaacaagttagagggacagactgcattggcggccggctctttcgtgaacgtagcacgtggtgtgggtggtgcaaccgctccaagcctgaaccctgagcccctttggccaagggaacatctgctgccacggtggatgacttgaggttttattgtataatttcatttgccgtgttattggcgtttggaagatgacgtgacctcatctcattttcctttgcctagtgaaaatagcaggggattgattttgttcccttcccaccattgggtgtgttcagcaccatcaacacagattgttaaatcatccttgtatgtttccgttttgctctgaaaygcttgcgtcgctggggacgatgaacttggctcaatgcacctgtgtgtcggtggaacttggcagatgggcggcgggcacctctccatgccgatatctgtaccccgaggaagcgtccgtggggtggggtaaagagccaggaagaggggaatctgggtttgattcccaaatctgacgccccagctgtgggacctgagacaagtcattcaacttgtaggggtgcccgcctcagtgggccgttgggaagattaaatggaatgatgaatgcagaactttttttytggattgtttttaatgtggtaaaatatacataacataaaactaatcattttaagcattttcagtgtctaattcagtagcatccggtacattcctattgtcgtgcaaccatctccacgacccatcgccggagctttttctttgtacccattaacaccaactctccataaccccagccctggtaacccctattctgcttcctgtctctatgaatttgactcctccaggacttcatataagtggaatcacacagtatttgtccttttgcgactggtttattttatttagcataatatctttggccgggcgtggtggctcacacctgtaatcccagcactttgggaggccgaggcaggtggatcacgaggtcaggagaccgagaccatcctggctaacatagtgaaaccccgtctcttctaaaaatacaaaaaattagccaggtgtggtggcaggcacctgtagttccagctactcggaaggctgaggcaggagaatggtgtgaacctgggaggcggagcttacagtgagccgagatggcaccactgcactccagcctgggtgaaagagcaagactccatctccaaaaaaaaaaaaaaaacaaaaaatcttcaagttcgtctacattgtagcatgtgtcagaattttattctttttttcaggctgaataatatttatggaaagggttaatctgtaaattgccatgccactaaaaacaaagttttagaaggtgtgtaaaaatcaatgtttgaaccaaacagaagaggtgaactgaaaggcacactctcctttcccttcaaccccagagccattccccatgtaatcgcctgtgcatcctccagacatttctctgcactgatgagcatttatgtgtgtgtcctttgtttttagacctccatgctatgaaccttgattttttcccctttgatgtcattcttccttttttttttgagatggagtctcgctctgtcgcccagactggagtgcactgcagcgatctcggctcactgtgacctccgcctcctgggttcaagtgattctcttgcctcagcctcccgagtagctgggactacaggtgcccaccaccacgcctggctaatttttgtattttcagtagagacagggtttcaccatgttggccaggctggtctcgaactcctgacttcaggtgatctgcccacctcagcctcccaaagtgctgggattacaggtgtgagccacctyacctgacctgatatctttccatattggcacacacacatagaaatgcctcatcctgttcaacagttgcttagcatccactgatagatggccatgtcttatttccccaggtccatgctgatgtccatgtatgtcgtttaccaatacttgccattacaaacaacactggaaatgattgttcttgacasaagagtgagatttacacctgaatccctagcagacaaggggcctgtgcattgagaagcctcacattgtcaaattgtcccctgtggagctgcccccttctccactgcacccaccctgcacaggaggggctttccccactgataacactcctgcggggtatgggccacagggcctttttttggtcactgccatatttgaaaagtgctacgtttctggtttaattcacattcttttaaaatgatgagtggacacaccttttttcacttgcctttcttcttatgtggattaaataattatttctttttctttcttcgtgtgtgtttctttttatgtgaatgactggtgagtctccttttctcacttttctacagagcttttcatctttgtcttcttgttgatttgtaagagttctttacatagtgaggaaagtgcactgtgcatgctagttgttgaaatctgttcaactcagggtcatctctaaacatcttaccttctttgaagttacccataaaactttgtgtgcccctgaaacagcaatgtttccttccataatcccgggtttatagttcctatccttcaccttgaggctgagaggctctccttcagtgtctgttgataatttacctaaccctcatcccttcctcaggctacacagagtgaggtggggaaaagatgatggtcagatgctaaggaaggagctggaaagaagctgtcaggggtgggggtggtgcgggactaacactgtgataaaggcagccaagcaacctcaaggtaagtattagttcagtggactgcagcgtggggtgttgtccctgccacagggcatcagggaaggcttcctggaggtggcgacagttcagctgagccacagtgggacctcagtggccatgtgctctcatccgcaggctcagaagttggccaggaaaagctgtccctgtgcctgagtgggctgtgggcctgtatggggtggggcggggcttctagttccatgtttttaagcgggagtgacctggagtccctagtgagggatttcgtaggctgtggggaaatagctgctgcggggtgaagtttgaagacaaacgacagacgggagatggggaggagtaaccccatttggggccaaaatagcccgaggggaaggtggtgtgtcgtccccatttcacagatttggaagctgaggctcaggcggctcctgcagccgggaggagggaggcatttccaaccctggcccagggctggctggagctgtgccgggcggcggccagggcggccgtgggtggcggtgctcgcgttgcatgtggtgtgtggcggcgtgcatgcaccaaggctctttgattcctcaactttagtttttttttctgattatagaagtaaaatagaaagaagaccttttttgaaatgacctgtgttagtcacctctctcaggatgcgtgaggcggacacgttgaggccacctcagctgatggaagtttccggtaagaagcccgttctcacagccgggcagcagcgccggtgagcttggggacgtgggctgtgggtcacaggcgcccgacacagcgccagcctgacagcgggaagccgaccccaccgtgctgggatccggtccctcccctgctctggcccctgggcccccgaccctggctcctgccgcctgggccctggccccaccccaccagcccccattgccgcccctgtctcccaggccgatgggtgaggcccccttcatgcgccacctccttgtggactgtggcagggtcactttgtcaggcagctggggcaggagccaggagcgttgtttactcactgggccaacagtgttgagtgcccgctgtggccagcactgggccggcccctggggtcgcagcagtgggcaagcggacagtgactcytgaggctcacactgagcggccgacccagacagacagagtcagtctgttaactagaccccgactgggggcgagtgccatgagaaatccaccagggcagccatgcggagrcggggttgtcactgygaagtacagggtgcaggaaggcgcccgagggagtgtgcgggccgtgcgtgttggggggtgtgtgttggtgtgtatctctttgggggtgtgtgtgttgatatgtgtgtgttcatgtatgtgttgatgtgtgtgtttaggatgtgtgtgttgtatgcgttgatgtgtttgtatggtggggcatgtatgttggggtgtgtgtattgatgtgtttattgatgtatgtgtgctgtatgtgttggtgtgactgttggagtatgtgtgttagggtgtgtgtgttggtgtgtgtttgttgatatgtgtatgtgttggtgtgtgtgttgtatgtgttgtgtgtgtgttggtgtgtgtgtatgttggtgtgtgttagygtasgtattgatgtgtggcattgatgtgtgttgatgtgtgttttttgatgtgtgtatgtgttggggtgtgtgtgttgggatatgtgtgtgtcttgctatgtggtgtgcttactgtgtgtgtatgtgtgttggtgtgtgtttgttgatatgtgtatgtgttggtgtgtgttgtatgtgttgatgtgtgtgttgatgtgtgtgtgttggtgtgtgtatgttggtgtgtgtgttagtgtatgtgttgatgtgtatgttggtgtgtgttttagtgtatgtgttgatgtgtatgttggtgtgtgtgtgttgatatgtgtgttggtgtgtgcttgttgacatgtgtgtgttggggtgtgtgtatattggggtgtgtgtgtgtttggggtatgtgtattggggtgtgtgtgtgttgctgtgtggtgagcttattgatgtgtatgtgtttgtgttgggatatgtgtatgttttgttgtatgttgatgtgtgcgtgtattgggggcgtgttcacacataccttttcaccgagcagcctgctatgtaacggccacccgggtcgacgggcctgtaggtagatcctcatttattgaaccaatttcctgtgttggacattagagtgtttcctggtgtgctcagttataaataacgtgctgccatcttgggtttctacccttacttaaggcacaaacaacatcttcagagagtcttaaagtctgcaatcctgcatttggacggcaatgtcaactgcagacttacggtccccaggcagccttaagcagctgtgcgtcataggcattaacgacataaaacagtatgtttccttaggcccagtgccggccatggggtgctgrgccctggatggctggtatcggggctgtgggtaccaggccctggcaccccacagttgttctgcctgtgctggggcaccttttgtttggggcaggaggacaggtctttgtgaggaattacagaagggactctcttctctgctggagaaagacctttgctgtttcattttacagccttgtttgagggaggctgggaggctctgcagtttagaatcctgttcaaagattatgctcatgggcctaagaggatttggctgtgaccaacttgtattacatgggctgtttgtttttactcctgccatgttctcttctgggtctcgggcatgtgttcttaggattactttcatttacagcctgagatgattgtgaattcttcaatagcatccaccttttagaaataggaagctttctaaagtcacgtttgcaagcccagcctttccgaattctgtgtcattaactcaagaccagagccgtctctcatccccctgcttacccctgcctccatgcaccatgctgagggcagagcgtgggcttcaccgtgctgtgtaaactgtgaagtgcagtaccccctgtgttgagctcgcctcccactctgtgaatagagcagacaatgctggggatgcrtctcccagcctcccttgcagctagggcacagatacctggccccccggtgctgctgccttgggacttgactcagaatgttggctggcaatgtgaggaacagggaccgggggccatgtgggtgatggtggtggcagcggaggaggcagctgcagtgatccagatggcggctgctgggttaatttgggaagaacaggtgccttcagacactgcttcatcttctaagccaggggctggacactgtgatccttggacatttctgttccttgtttttaatgcttctgggaagtgtctttattttgccttttaaaaacgcagagtggaatgtgcatttaagggaaggcaaatcccgcttttctagtggaaatgagcctgcgcctccccagacagctagatctggagatgctgctgcccatgagttctgcccctttgtttctgtgtttggaaggcctggcccaaaatggggattgggggtgccccagtctkgtctgggatgggcaggaattatttcccagcaaggtcaaggctgctcaacactgtgagaaccctggcctgggcatcaggaaacatggcttcctctccagctctgactttgctgggcaaccctggacaaagccctcaccctctctgagccttcacggccccttctatggactggggatgatgatcatgaccaaggcagtcrtgaggaccatagatcgcacttgccatggccaggccatctgtaaagtggagtgttcaggttagagaggacaagttggtgttattggagggaacctgtggtgatgggggagagggtgacctggtgacacagcccttgatggctaaaccttcctgacaatgtcacagggccagcctcctgccctttgcaaagcactggatcctcaaagaataatttacactccagaaaatggaatccatactgggtgggttctatcacgtgtagccttgggggatgagacctgggaagaccgatgtgaatacatgcaggacggggcatccggtgtctgccagctgccacctgctccggacctgggccaccggctctgctgcctcagcctcttcacttgctccattttaatcacagctcactcatcagccttctttggagaatgctggggactgagtggcaaggtagggagactccgggctttaccttaagtggacgtatgttggaacagtaacttcgccccctaataatgataataataacagcaactgaggaagagctggggttcacagagcacctgctctgcaaacagcctgcaggatctttcggtgaaagttgtgaaacatggacatttaggtgctccataagtgttagccaaaaaaaaaaaaaaaggaaaacgggaaagaaacacagacatgattctgctcattcccgctttgctccctcaagtcccttggaggggcgttatctgggctaccagggactgcttgtttcctggcggttgtagccgccctctcctggacgcgcttccttttggtttgggcacacttgggggtcttcctgcacctcggccttttgctctggacagatggcctttgctgtcacgggttggctctgaygtcctttcctctgtgagggtgcacagcacccctgggcccctgcagcctgcctcagcccctcctcactgccatctgcaccctcagaacatgagacttggtgggtgcttcctcgagggactgagaggcctcgaaggacactgccctggagagcggtgccggctgtctcagggtgggaagcctccttggtgacactgtgtgaatggaaccccacccgcccttgctgcctttggtgccacyaggcacagctcccggccccaggaggggtgatctttcttggggatgccaagctggctctgtggtccctgtcactcagagcgggctcctcccctccacacacccattttgagaccccagagcacagtgatgccrcagctgcacttaacaagcaggaatgtgtccctcctgttggtcaacatttggggcctcactgtgacaggtgcacagcagcctggtggagaaccaccctatgcgcctgtagaaagggccagatggcaggagccaccttgcgttttgccttgaggtttagttgggatggccayttacagtggtcgcagccactgttctgagagctttgcatgttcagtgggtacaaatctcatggttgcctaggaggtaggggatggggcagtgtccatttggcagaagaggaacctgaggctgagagaagttgattcccaaaaacacagcctgttgtggggggccagggtcccagcccagcagtccrgctcagagtcacaccctgctgtcatgttgttacccggacagcgggcaggttcagttgcgtggtgggtgacagtccagcgaccacagccacggagggcttaacaaggggattgtaggacttgcagcaagtaaggaggacaccagggatggtccccaaagcagcgcctcccgggcagaggggatcccagggtttcacggggctgctgggctgagccatctcatggggggttaaagtcagtgcaggtgcggtggcggatcacgcttctacatayrtcgcgtgcatggaaaatggcggataagctcctctcctccctgggtggggtttttaggatgggcttggaccttttctgaaacaaggagaactcaagatgcagttacaagtgggtgctttttcacggtgtgtacctcaaaaccccaaacccgggaccccggcttaagacgtcatattccatgggcggtgctaagggcagagcctggcccagagtaaaccctcgagaatcgttactcttgttgctttcctggggttcctgtaaagcaggcgtggtgccttgtggtttgtgaatctgtgtccctaagacacacgctgtggtgaatgattctctgggactcatccagctgcttcccccagcactgagtgtggcctcacagtgggaatagtgggctccgtcactcgtgcgctctagcctctcctcccattcgctgctgtcccctcccagtctcctggccattgtcatcctgggggaatccttgtcatgggagaccttcccaagcagagaagtgagtggtcctcacccactgttcttcatttcacatacatttattgagcatctgctgtgtacccagccctgggtcagtggctggggccacagcagtgggcaaagcagacctagggctcacggtctagtgggcagagagatgtgggccctctcagcctcgccaattttccctctgggaggactgtgccagggaagagggatgggggatggggtaggggctttggagtcagtggagctgcatgtgaaccgcaacccagtggctttccagcacttccatgggggcacagggctgagcttcaagaatcctcagttttctcatctgcaaactggaggtgttggcacccacctcactgggttgtctggaggctaatggttgatacgttccatggggcccaygcagcttggctcatggtgtgcacgcattgactatgagccccctgctggctcccagcctggccgcttaggtgggcggctcaggtggtgcctagaggagaggccagggctgcaggggagaggccagtctgaggctctttgtcgtgtgtgaaatccctgggttaatccctggccctgcccagagcctgaagtgggagctcctgcgtcgcttccttgaccgtgagcctttgctggctgactaggcctctgcttctgctgccgatgaggctgccagatgttcaggcctacggcccagcagcccctcgtcctccagctgcccccttccctgtccctgtgaggtcccagccaagccatctgcctatggagacatgaataggccagctctgggctgctctgaacctggtgatggcaagaaataaagtaagtytcgtgcgcgtccgtgtgaagagaccaccaaacaggctttgtgtgagcaacaaagcttttaatcacctgggtgcaggccggctgagtctgaaaagacagtcagcaaagggagataggggtggggccgttttataagatttgggtaggtaaaggaaaattacagtcaaagggggttgttctctggcgggcaggagtgggggtcacaaggtgctcagtaggggagcttttgagccaggatgagccaggagaaggaatttcacaagataatgtcatcagttaaggcaggaacaggccattttcacttcttttgtggtggaatgtcatcagttaaggcaggaactggccatctggatgtgtatgtgcaggtcacagggatatgatgacttagcttgggnnnnnnnnnnnnnnnnnnnngtgatacgttgggctttggtggccagatctgttcctgagtctccctggctgtcagaacacactggctctcagacgccagggtcagatctggtgactggggctccaggcagtttgggtcgagtggaggaaccctctctgatgattcatgagaccttgcctaggtctgcaggatcctgaagattctgaggcagggcgctcaccagctcaggcagccacccttcagctgtcccaccttgcctgggcctgagcacaggcccaggaagcccctgttcaggacatgttcacaggcaggcaggaagggccctcccggcccgagccaacacccttcaccccagctccccgcacaagctggccttccggagagccagggcgggctttgcaggccgggaagaggaagagatgtttgcccgggcaggggccgaggacttcccaggccgagggtacagggcaggcagcagcctgaaaacacgggccagtttcacagcccgtaaccaggtggtcacacagggccccgaactcagaagggcccactggggtggatgctctgcgctcaccgtcctgagattcttcatcgtcttatcctgggcttggtgttctataagtggagttgctgggaccgtggatcatgtcctggggcttggagtctgggctcacgggctgtgcctcctttgtcccttccccagctcctgggacaggttctcagctgcccgctctcctcctgctggggccccaggccctgccttctgtccagggtggcagccaggtcacttctcgggtggccattgctcaggggtggcctgtcctccatgggctgaggtggtggggcctgtgggaagggggccaacatctctgttcccggctggggccccatattttggttttgcaccgggcctggaaaattctggagccagtcttgcctgaagagaggtgcattctggaaatggccggagttccatgtggccagggcataaggaagctggggtggtgcctggaggtggggtggggtcgggcggggttacccaggccttggcaagtccctggcaagctgttgaggagtggggctgtgttctcatggtattctcatggcacatgttggttggggcacttggcaggtccatgcaccttggccacagaggctgcatggcagggaggtgactcaccgtctggggcaccaggagaaagagagaggggtgttctgttccgcctggcactgctcaggggtgcacagcagctctgtgggtttatctcacaccagacttttcttagagccagaaatgggcaaggactggaggcagcttgtccggtgcattccttctagcggggtaaaccgaggccctgagaggggacagatccccgctccctggccaaggtcgctcagcgagttggtagcaaatagctaatattaagccagttcgtttggaattctaggsagaaatggaaatatttcaatggcacagataaaaaaactgaggctcagggtggctgaggctgcctgggatcaagcgatttacaatggagctgagattcaaacctgcagctcccgacaccagcctgggctccttctcctccgcattgaagccgtggttggcgtctcccactctttgggatcctggagtaggctagtgagcagctggggaactcggggctggagtgcgagggtggatgggtgggtggcagggctgtaacaaagcctaccgtgatggctgtccccctcctcagggaatcaggcctgattgcacttaatgaggctggtggggaggtgttgagtttgcattttctgctcagtgggaggtggccatgatgcatattcatttatgcaaaaccagggttggttctctgcaccctctcacccctctacctctttcttcctccaattgggtcgctggagcccaaagaccagcccccggattctctccctcctttgccagctttcagccccagtaacaggccagggagatggatggacattctcgctgcccagggccaggcaggcactgcgctcagggtgccctcaacatggagcrttcacgaccaccccctcttcttttcttttyaccaatttaaccattttagagtgcacagttcagtagcatttagtatattcatgttatacaaccatcaccactatctaggcccagaacattttcatcaccccaaaaacaaactgttaaacttgtcagctgaagaattgccaggaccacacactgagcgccgagagctttcttcctcatgaagggctgcagcctgcaggctggctaacctcaggctgggaagcatagcctctggcaggagccagaagcaggcatttccaggaagggaatttatgatgaacgggttagctaagtatatgtattcaacaggctataggaagagctatgaatattcacggagacgtgtgtgcatttgtcataagctaacatgtatgttacatgcatcctatgttgactttggggtagagacttaatatgtaagtattacagtcagggccctacatgtcagaaggtgaagcagaggacgggaagagcctctgtgcagcctctgtagatgagccagaaccatttcaagatcaggactcttatcaagaaggaatgctgggnnnnnnnnnnnnnnnnnnnntgggctgggcaacgtggctcacgtgctgtaatcccagcactttgggaggctgaggcgggcagatcatgaggtcaggagttcgagaccagcctggccaacatggtgaaacgctgtatctactaaaaatataaaaattagctgggtgtggtgacgagtgcctgtagtcccagctattcgggaggctgaggcgggagaatcacttgaacccgggaggcagaggttgcagtgagtggagatcgtgccactgtactccagtctgggagacagagcaagacctacccctcccccatccccccaaaaaggacagtctgtgttgaaactgaaaaagaaaggggcagccctgagtggttggttggaatcagcagtagggtaaggctttcgaaagggctggtttctgcttaacccttaagagggaaagcataatggcatttagcgaaggagggggtataatgcagtgtgtctgacctccggtcccattgtggcctggaactcaggtttttttttaaggtttctctggagtccgtttggccaagagggggtccatttagtcatctgggggtggttaggattttatttatttatttatttatttatttacttattttgagatggggtcgcactctgtcgcccaggctggagtgcagcggcacaatcttgcctcactgcaacctgagcctcctgggttcaagagattctcctgcctcagcctcccgagtagctgggattacaggcacatgccaccatgcccggctaatttttttatttttagtagagatggggtttcaccatgttggccaggctggcctcgaactcctgacctcagatgatccaaccatctcggcctcccaaagtgytgggattacaggtgtgtgccaccacgcccagcttttatttttattgtttattttgttatttatttatttggagagagtgtctcaccctgtcacccaggttggagtgcagtggcaccttcatagctcactgcagcctcaacttcctgggctcaagtgatccttctgcctcagcctctccaagtagctaattttaaaatgctaccatgtgtggctaattttaaaatgtttttgtagagatggggtcttgctatgttgcccaggctgctctcaaactcttgggctcaagggatcctcccacctcagcctcccaaagtgctgggattgcaggtgtgagccactgtgcccggcctatttttatttttcaaactaaatgaaatttagcctgaagatgcctctgtacatgaatcctttcttaatgaactgcaacctaacttagtttgtgattaacggaagcctgacttaggaggggctcttgtaacaaataggtgaagctcggcccaaccacagcagctgagcatctgtcaatccagtcccaggtggccaaccattcaaataaggcaaaggctgagctgtaaccagtcaagctgtcttgaccctctcttccgttttgtgtccataaatgctgcctgatcacggtgcagacgtggattcctagaccctgttctggttctgagagcagctgattcgtgaatcgttttttgctcaattaaaccttaattttaacttgtcatactcagtaagcagtcactcccattcctcctccttctagtccctggcaaccatgagtccactttctgttgcggtgaatctgcctgttctggacagtgcatggaaatggaatcatgcagttcacttacattcagcttctttcatttggccgagtgttttcaaggctcatccaggatgtagctcgcattagaacttcattccttctgactgggcacagtggctcacgcctgtaattccggcactttgggaggctgaggcaggctgatcacttgaggtcaggagttcgagaccagccagaccaacatggtgaaaccctgtctctactaaaaaaaaaaaaatacaaaattagccaggcctggtggcaggcacctgtaatcccagctactagggaggctgaggcaggagaattgcttcaacctgggaggcggaggttgcagtgaaccgagatcacgccattgcactccagcctggtcaacaagagcgaaactgtctcaaaaaaacaaaaacaaaaacaaaaacaaaacttcattccttctccgggctgaatatgttccactgtatgagtggaccacattttgcttatccattcgtctgtggatggatggatacttagggtgtttccattgtttggccattatgaataaggctgctgggaacattcgcgttccagtgttcatgtggatgtgtgttttcagtgttccgtgatagacacccaggagtggaattggtaggtcacaggataattccaggtttaatttgttgcggcggtaccaagctttttttgcggtggccctgccgcttcacctgcccccagcagtgtgtgcaggtcccgcgtctctcccaacagccaacactcgctttgcatttggattccagacatcctcgtgggtgtgcgttgtctcattgtgactttgatttggatttccctaatgactcatcacgttgagcaacctttcctgtgcatgctgaccattcggtgaaatgtatgtgtccaaggccactgcccattttgaaattgggttgtttgtctttttgttgttatcatccatgaggaaaacaaggatcagagagggtgagtaacttgccccaggccacacagcaagaaggagggaagacagccttagaaacccagtgggcctgactctgaagtcttgtgttctttctttcaaacataagggagctggtggttggggctagggaaggcctttatttcctctggagcagctgcttgggatgcatcctggatttcttgcccctccgcagcacttgcccctctgagggcacagtccttggacatggttctcaacaggacactcctggggaatgtgatcaggaggccctggaaccgcacttggagaaacactggcttggggtttgccataggacgtatgacttcttgacccaaggcttgagttcggagcctccccggtccacccctgccaggctgctgtgcatctgcggcctgcccctctccctgcctcagcttcctcatctgtgtaatagtgagagaggaatgggatcccacagtgcttagaaagccattaggagtatcaggggatggtccctattggtgtgtctgtctgtttgtctgtctccctcctgggcggagtgcctccaaagtgggagctgtgtctggctcagcagatattagccaagaaccaggggccaaggagaagggccccagggcagacccctgctgagacctcagcatcctgtggyatcagaaactggtgcagctggtccctccgtgccctgtggccacttctgggtgctcacgcagccagcccctgggcccacatttgagcagaactcagtgctcaatgtggttcctgtgggggaatccaccatgcccggtgactccgggggccccagccctgccatccccgtgtggggaacatggggctggagggaacacagggtgggaattcttggagctctggaagcaggtgcttgggaagcatgagggtcttggaatctcaggtctggattcacttgtgtccccagctgtggggtctgggggggcacattgtggacctcgccagcctcaatttcccacctctacagtgaggattggtaatgcccgggagtgctcccagcacggctggggttatgttcatttgaacaactactgaatgacatcagccttcctgggtacttacattttggggtctcagaaaagggttaaaggcagcaactttctgcctctgttggagtcccagataccctcttcctggggtagggcagactccaggccaagggaccaggaaaggcagggagaaggcaggagagtgggtgggagggagctgtgagtggccgggagagtgcaggcaggagcggtgcatttcacagagacaggcccatcgggtgaggtttggaaacaacacwtctctgttcccagagctcagtggcccccacttgtcatggcccccaaagccattggcttaggggcccccttgcctcttggggagaacagaacccaataagagcaaagtagtcaccgctggaggcaggtttagtgggtggctctggaggcagatggcctggtgtgcttcccggctcttccgtgagctgtgcctcagtttcctcatttgtaatatgagggtagcaataattcctccctcatagctagctcttggatggtagtaaatgctcacaaatgggctgttctgcagatgcagtgtgtggcaagggagagtggccccctggaaaggggaccggtggccagtccaggggaagcggtaccagctcctgtgtaagygcctcctacgtatgaactcacatcacctcgagggaggagaggagggccctggaggggtgggacgtgggttagggctcctgagacgactcctaagaagtgcatacgcagggagatgaagmcacactgaatgggtgggctcctctctggagcactgggaggaagccactgtgtggggtgtcccttgttagggccttgagggggctcaatgaatggcagaagcttctaacccacctgaatgatacattgaagtccccgctttctggctagatcatgggagaggggagccctggtgaatgagaagatcctggaggcagttggtaaagagtgcgtgtctaattgatggtagctcatgtgagcagtggtttacgaccagctgaacacaacatacaagtggcaggataaagccccaaaagccctcaccagcaggtttgcctagggcacagggctggaactgggtgctgtatttgcacattggaggcatcctcttccttcagacaacatgcagtggtgggcacccggcttggagtcagacagacgctgtggccaccgatgctgtgtggcctcaggctggttacttagccttttcgaaccttactttccaagccttgtgcatttcagactctgctaattgagggaattgaatttgctcctcatctgcattctgtcctatcaggataaggaggtatgtaagccccagaggtcatggtgataattaataagaacaatggacaaagaatacagaaatcagtctccattsggccacttcccagccctgggcactttgcctcctgcacttcagtttctctgtgtgaaacatggctgataactccagccttgagagttgctgggaagaatctgtgacccgatgcagggaagactgcaggcatacctgggcacgtggtgggccttgcataaatgacagccacaccacagctcccaggctccaagctcagtgctctcctgtccctctcagcccctgcatggcatcctgtctccaaagtggaggtgaggaaggctgctgttggggagtgtggagctgcgaagctcatgccatacaccccttggacttgaatcacacagggctgccagtttttattggttttgggctgtgctttgtgccctggggatggccctgtcatgctctgtttcaggcagcccctcgcctgtgtgtgacgtgggtcatttgtcaccctgacagtattgacagggctgctgctggcctgggatggaatccactctgctcagggcagtgcctgagagatcttgtccagaaggatgtgggacagtgagctgctcggggacagagttgccctttttttgggtatagaccatgctaccccctgcggtaatgttggctgttgacagaggactgctgtgagcccagcccgggccggagccccgcttgctgagtgtccactccgtgcctccctcctcctctgcacatctcccaccctggggcaggcaccattgtcattcttgaggttcttaggacccctctcaactccccagcrtaccccttcatccactcaccccctgtagccagagccattggtctaacctatgaatctgatcctgtccctctctgcctgttaaagcgccttgggggctccctggggaataacacccagcccgtcctgtcactcttctgtcccctctgagggtatcatgccctcatttcaaataaccaggcagaattgcaggggcaaagcagctcaccccaggtggtgagatatatatgagcaagccaggacttctggttacctgactgcaagcccacaccctcatctcaggccactctgtctcctccttccttttctgcagttttgtgtctctgtggatcactttcaggtccttcttgctctcccacactggtgtttgaggggcttggttgctggcacacagcatgcatatcagtattgcctggaagagggcaggatctcccaccctctccctgttagctcctctgttacccaacttgcttatttattcattcatttaatgaatatcattaagtgcctgtttgtgaataggtgcggacagaatggggctgaatgtacatgcctcaccactgagtagtggaggcacagaattatcaaatgggcaagggaacagcagatgcaaaggccctgtggcaggaggcagcatggcccagaggcctgtgtggctgcagaggagagggaggctgcatgacgggagctggggctggggagctaggcatgggcctgtcccgtggggcctgggtggacttttagggttttagctttctctgtggctctcaaaagcatggggcctggctctgttctccctcctcataccacagggactattttggcttgcactgtgatttatctcttcctaccacagttcccttctttcctaggtgccgtgggggctctcatatgactccagcactaggcaagccctgtaacctaaggctcctagaaacttggtctcccaacatagctgggggcccaacacagctggtattctaggggagtcagaagggtggatggtggcagaatgctcccctctcaggagtctgctcactatcctctccattctgtcttctgaaagagatggtggagaattgctataatttcttccttaaatatttgttagaattcaccagtgaacccatctgggcctggtactttctgtttgggaaggttattaaattgttggttccatttctttttctcttttcttttctattcttttttttttaagacagagtcttgctctgttgcccaggctggagtgcaatggtgtgatcttgtctcactgcaacctccacctctcgggttcaaacaattctcctgcctcagcctcttgggtagttgggactacaggcgtgtgccactatgcctgggtaatttttgtatttttagtagagatggggtttcaccacattggccaggctggtctcaaactcctgacctctgatgagccacttgccttggcctcccaaagtgctgggattacaggcctgagccaccacacctgggccatttctttaatagatataggcctatttagatagtctatttcttattgtgtgagttttggcagattgtatcatttaaggaattggcatttcatctaggttattaaatttgtgggcatagagttgttcacagtgttacttgattatcctttgaatgtccatggcatctgtagtgatgtatcctcttgcatttctagtattaacagttgtgtccttctcctttttccttgttagcctggctggaggcttattaattttatcgatcttttcaaagaaccagtttttgatttcattaattttctctgttgatttcttgttttcaattttatttatttatgctctaatttttattattttcttgtgtttactgtggatttaatttgctcttcttttcctagtttcctgaagtggaagcttaggtgcttgattttagatctttcttcttttctaatatgtacattcaatgttataaatttccctctaagcacagcttttgctgcctctcataaattttgataagttgtgttttcatttttaattagttcaaaatacttttgaatttctcttgagacttctttgagtcatgtgttatatagaagtgtgttgtttcaatcctctccattctgatactgtcaggtggggtttttgcttctttttccgctttgcatgacagactcccttctgcctggagacagattttctggcctcacctgggactgtgcacaagtcattagctgagcctcagttttatcatctgtagagcagggggcaaagtaccaacttcccaggtaatatggacctggagagtttgtaggtaggggarctggtattggaacccctgtctacctggcttccagaccccagtatttccccttcttcccacactgggctccaaggtgggcctccaggctcagcatgatggactgttgaaatgataaatgaaaggaagaggtgcatcaggggaggggatgcatttctgtaggaagacatcccaaagagccgcarggtaatttcttctgtcttttttttcctagttgtgcaggccgggccctctcacctcttagaacctcagtttcttcatttgcaaaatggggaaaatatgtattagagatggataataacagcagcacctgacgtgtagggagtactttgcacatgccaatttccactgtcactgagatcttcatgtggcttctgggaagtagtccctcttatcattgccacttcacagagaagagagtgaggctcagataggctaggtaacatgcctgggctctcctagctactgagttgtccagccaggttttggacccagataggctgactccagggtgagctgttgggttgagattcagttgtgtgcccagcatggtgcctttcacacagggcaggtgccgggcaaggtgtggttctggggagtcagcatcacaggggaagatcagtcctgtccctcactcagagacccctgtctaccttctgccaggcgagcaatctggtgggcttgctgggaaggaggccacatattggcatcagggtctccctcccgcctggggctggtgaaggggaaagccactcacagttattcctgggagtgtgggcgtgggaggaacccactgcagcagggctttttaaagaaaactctgccttgtctataaatatcctcctgacgtgtccccagttcctgagcttctgggacagtgaggcagtgccctgcctacgtgccactcgccaagactgctgagtgatttcgcagtgggagggagcttggggtcagctggggcggggtttcatgaaccagtgacatctcccacagacactcaaggggactgcattgcgccaactgtttatattgccaggtgaggactaaaaacaggatcccttatgatcactctcttgtcagatatgaaatgtgttaacgccaaagcatgtagaaaagtaaagtgcaggctagcaaatggaatattttcttttaaatgaaaaactcgctgcagggtccatgctgttctaattcctccagaattttatagaagccacgacaggcagcacacgctcacagggcctgggaggaggagtcatgggcccggcagtactgcccacacctggggcagggtggacagatggacggatggcctggtccaggagctgggcatcctatcaggccctgcggatggggagttaaaggctagccaggccctctctgaggtgcagcttgctcagctgcacagaggagtggtggtcctcaccttgcaaagcagcactgcgggtaagacgaggcaacgggcaggaatttgctgtgcacacagtccttgtcatcatcctctttkcaggctgcaatgccaagaaactctcccaggatggtcctggagcccccagggcagggttctggggatgtgtggaggacgatgggcagtcaggaccacactgtggtgggtcctaaggacgcctgccagaaaaacatcacgcatgtggataggagttgaattgcatcactcccctcacccaccaccaaatacttgttgaagtcctaattcagtttctcagaatgcgaccatatttggaaataaagtatttgcagatgtagttagttgagatcaggtcatactggagcaggatgggtccttaacccaacatgactgatgtccttataataagaggagaggagacacaatgacacacacaggagaactccttgtgaggacagaggcagagattggatgctgcagctacaggccaaggagcaccaaccattgctggcaatgccggaagctgggagaggygaggaagaatcctcccctggatccctggtggctctgccggacacctcgatcttggacttctggtttccaggacagctttacagtactttattatggcagtgctagcaaacaaatacaagcacctaacttmgtgctggcatgcagttggagcttgataaatgcttgctgaatgaatgatatttattgagtgcttactacataccaggcaataggcaaagggattagatgatagttaaaatttctcgtgtgtttatatgcaaggcattcttgtaagcacgttagaagtactcactcatttagtctgcaygacagctctttgaggtgagtactctgtggttctctttttgtgcatgagaaaaccaggacacaaagagatgagtctcttgcccagggtcacataaacagctgagttgagatccaaaccccatcagtgttaacttccaggctcttgctggttagccctgcaatgctgcctcccagcctttggcctggcacagagtaggtgcttgggaaatgctcaccatccrgtacttgttgaatgctcttcccagctgtgccaagaaggttctggttctatgagagtgttcrgttgtcaaacaagagaagtattttgctctcttccccagtttgccagagcctccagttgactggttaagatttaaccattaagagctgatttgattctacctttaaagtgaccagccgccacctgtattagcatcctgttgtgggtggaattgtgtcccctcaaaagatatgttggggtcctcacccctgatgcctgtgaatgtggcctcatgtggaagttgggtctttgcagatgtaatcaggtgaagatgaagcaggacctactagattagggtgggccctgatccagtgactggcatccttagaagagacacagtcataccaggagaaggccacatggtgatagagacagagattgtagtgatgcagctacaagccaaggagtgcccaggcttgcaggcaacacctgaagctgagctaggcgtggagcagaccctcttctggagccttcagagaaggcatggccctgctgacactatgttttcagatttctagactccagaactgggagagaatatgattccgttgtttggggccacccaggttgtgatgttttcatggcagccctaggaaatgaatatccaccccaggcattgcagagctgacctgtgcttgtcctgcactaatttctatcccacattctttgggcatattccagaacccggtgtctgaacctccccagcataatagttcagaccattggaacaatctctttttgagttcagagcctgtgggaggtgagtcctacaaaaaccaagggccctggggccagccactgggggacaaatactcagctccactccttatcaatgctgagaccttgagccagccaggtcacatctttgatcaccaatcacctcttctatcaaagtggccataacaaaattgccttgagacctgtgagggttaaagggggatagatgtacaaatacctgggcagtacctcgtcttacctggtcctcaataaatgctacttgaattgaaccaaagagaataccaactcctccacttggttcatttagtaaatgaaatgaaatttctgttaatctcataggttcacaaaattgaaaagattggttgcacaacattgtcacctgctatttagatacataggaaaagaatagctaaattataccaggttttgtaccttctgaaaaaaaaagtcaaaggacggtaaattattttttccttacataaaatgaattcggtgcacatgaacatggttctgcttttktattcttcagcttcctaaatatatgaggcccaattatacaccccatctgtatttgaacatttttagcatgcctcagaattagtgttgatttaatttatttccaccagagatttgcaaaatatttccttaagttattctgaaccggaggtgattcattcaaggagagagtgggtggtgtcttcagagtgggtgctccccactggagaaaactgagccaagtggggaggagatgggggcctctgggggcccttccctggcctgcccaccaccccttctggggtgtggcccagtgcrcgcccttttcatgggtctgcactgctgatgggggagcacagctgaagctccctggttgggcacagatgcccttaatgaactggtccaggcttgttcaccctcatacctgacctgtccctttcatactcaccctacctacttgagactcctccagctcatcagggagctgcacaaatagggtctgtgcatggcaattgctggcttctcaggctggttggcatggcccctccctcgcagtgactggcaagcctcttgtttcctgggaagcctttctgtggctcactcttcaccccctgttccacccctgggaggacccttctctggggctccccagacacacactgtctctctgcctctgcccagagaccatggcttcctctccatgcaccagcaccactgctccttgaaargaaaacagcatctctgtgcccactctttggactgactccatcgtattccagggcctatttgttaaactggatggaaaaccaaagcctgtagggctgtaatttattcattaatatcttaagttttcaagattaaacatatttactgggtagatgcttattaaatgcttgtgaatgaatggatgagtgagtgagtgaatgtataaattacgtgttgtcctttggtaaattttctagctttatgatataatcaaattatcctggctgcagcaagtctttaaaaagcccatatacttagagcaaaattaattgtattgttaaataaaattccccaagatgcaacaaagtgcagtgaagtatttttttttatcctgatatgtggaccagctaatgctgttaaatcagcattttaaatgtgtggttttattgggtctgatttcactgggttttatcataagatgaaccatttgcttttgaactgaattgaactgaaacctacagctattgggcccttatcataaaagtgtcaagtgccaccctggacactgttatgtacattatatcattgtgcagaccctggcccaggtgaggtcttatcctcactgccaccattggcatcattgtaattatcaacactctcaccatcatcaccaccaccagtatcaccaccaccaccaccaccaccaccatcagcaccatcaccaccatcaccatcaccaccactaccaccataatcaccaccaccaccatcaccatcaccaccatcaccatcaccaccaccaccaccatcaccaccatcaccatcatcaccatcaccaccaccaccaccaacatcagcaccaccaccaccatcaccatcaccaccactaccaccataatcaccaccaccaccaccaccgccaccatcaccaccacccccaccatcaccaccaccaccatcaccaccaccaccatcaccatcaccannnnnnnnnnnnnnnnnnnnnnnnnnnnnnnnnnnnnnnnnnnnnnnnnnnnnnnnnnnnnnnnnnnnnnnnnnnnnnnnnnnnnnnnnnnnnnnnnnnnnnnnnnnnnnnnnnnnnnnnnnnnnnnnnnnnnnnnnnnnnnnnnnnnnnnnnnnnnnnnnnnnnnnnnnnnnnnnnnnnnnnnnnnnnnnnnnnnnnnnnnnnnnnnnnnnnnnnnnnnnnnnnnnnnnnnnnnnnnnnnnnnnnnnnnnnnnnnnnnnnnnnnnnnnnnnnnnnnnnnnnnnnnnnnnnnnnnnnnnnnnnnnnnnnnnnnnnnnnnnnnnnnnnnnnnnnnnnnnnnnnnnnnnnnnnnnnnnnnnnnnnnnnnnnnnnnnnnnnnnnnnnnnnnnnnnnnnnnnnnnnnnnnnnnnnnnnnnnnnnnnnnnnnnnnnnnnnnnnnnnnnnnnnnnnnnnnnnnnnnnnnnnnnnnnnnnnnnnnnnnnnnnnnnnnnnnnnnnnnnnnnnnnnnnnnnnnnnnnnnnnnnnnnnnnnnnnnnnnnnnnnnnnnnnnnnnnnnnnnnnnnnnnnnnnnnnnnnnnnnnnnnnnnnnnnnnnnnnnnnnnnnnnnnnnnnnnnnnnnnnnnnnnnnnnnnnnnnnnnnnnnnnnnnnnnnnnnnnnnnnnnnnnnnnnnnnnnnnnnnnnnnnnnnnnnnnnnnnnnnnnnnnnnnnnnnnnnnnnnnnnnnnnnnnnnnnnnnnnnnnnnnnnnnnnnnnnnnnnnnnnnnnnnnnnnnnnnnnnnnnnnnnnnnnnnnnnnnnnnnnnnnnnnnnnnnnnnnnnnnnnnnnnnnnnnnnnnnnnnnnnnnnnnnnnnnnnnnnnnnnnnnnnnnnnnnnnnnnnnnnnnnnnnnnnnnnnnnnnnnnnnnnnnnnnnnnnnnnnnnnnnnnnnnnnnnnnnnnnnnnnnnnnnnnnnnnnnnnnnnnnnnnnnnnnnnnnnnnnnnnnnnnnnnnnnnnnnnnnnnnnnnnnnnnnnnnnnnnnnnnnnnnnnnnnnnnnnnnnnnnnnnnnnnnnnnnnnnnnnnnnnnnnnnnnnnnnnnnnnnnnnnnnnnnnnnnnnnnnnnnnnnnnnnnnnnnnnnnnnnnnnnnnnnnnnnnnnnnnnnnnnnnnnnnnnnnnnnnnnnnnnnnnnnnnnnnnnnnnnnnnnnnnnnnnnnnnnnnnnnnnnnnnnnnnnnnnnnnnnnnnnnnnnnnnnnnnnnnnnnnnnnnnnnnnnnnnnnnnnnnnnnnnnnnnnnnnnnnnnnnnnnnnnnnnnnnnnnnnnnnnnnnnnnnnnnnnnnnnnnnnnnnnnnnnnnnnnnnnnnnnnnnnnnnnnnnnnnnnnnnnnnnnnnnnnnnnnnnnnnnnnnnnnnnnnnnnnnnnnnnnnnnnnnnnnnnnnnnnnnnnnnnnnnnnnnnnnnnnnnnnnnnnnnnnnnnnnnnnnnnnnnnnnnnnnnnnnnnnnnnnnnnnnnnnnnnnnnnnnnnnnnnnnnnnnnnnnnnnnnnnnnnnnnnnnnnnnnnnnnnnnnnnnnnnnnnnnnnnnnnnnnnnnnnnnnnnnnnnnnnnnnnnnnnnnnnnnnnnnnnnnnnnnnnnnnnnnnnnnnnnnnnnnnnnnnnnnnnnnnnnnnnnnnnnnnnnnnnnnnnnnnnnnnnnnnnnnnnnnnnnnnnnnnnnnnnnnnnnnnnnnnnnnnnnnnnnnnnnnnnnnnnnnnnnnnnnnnnnnnnnnnnnnnnnnnnnnnnnnnnnnnnnnnnnnnnnnnnnnnnnnnnnnnnnnnnnnnnnnnnnccgccaccaccaccattaccatcactgtagttatcaatactgtcactatcatcaccaccatcaataccatcaccaccaccatcagcatcagcatcagcatcagcatcagcatcagcatcagcatcaccagcggaacgactaacatgtactgagcactcacgccatgccaggcatcgttctaagcattttgcgtgtttttctcatgtaacactcactaaaccgcatgcaatgggcgattattatctccatgttacagatgaagaaattaagagaaggacaaattcagggacagctagtgagtgttggagacagaaatcaaataaagttcctcttattcattcattcaacaaacattttctgttttttttttttttggttttttttttttgtttgagacggagtctcactctgttgccgaggctggagtgcagtggtgtgatcttggctcactgcaacctttgcctcccgggttccagcaattctcctacctcagcctcctgagtagctgggaatacaggtgcctgccaccatgcctggctaattttttggatttttagtggggacattgtttcactgtgttagccaggatggtctctatctcctgacctcggggtccgcccacctcggcctcccaaagtgctgggattacaggcgtgagacaccgtgcccggcctcaacaaacattttctaagagggcctcctccgtatcaggcacatttccaggggctgggcgttgttgggctgagaagacattctggtgtgcgtgtgtgcgtgcgtgtgtatgtgcatgtgtgtgcctgtttgtgtgtgcatgcacatgcatgtggggcggggcagggacacagatagtgaagaataaatgaacagaaacaatttcgggtacatataagcaccatgaagaagttaaaacagggtgatggatagaaggtgatgatggagaaaggccatttgaggctggatgtccagggaagatcagagtaggtgtcatttgaaccaagaccagagaacaagggtgagatctggggatggagtttcagggaaagggatggtaagtgcccagctggtcagccttgctccagggacagaaagaggctagtgaatcttcagggtcctgagcaggggtgggggtggtgggaggtggtgaaagggggccaggccatgcaggttggagtttgggcttactccatgtaagatgggagggatttgaagcaggtgggtggcatgatcctgtgtaggttttgtaaggccatttgttctgctgagtggagaatggattgagtggggcaggaatggagatggggagaccagtctgaagttgcaggtgagagatgtggctggcctgactatggtggtggctgtggaatgagaggacgttagaagcacctgggacacttgtggaaatgacatagacaagaataacaaatcagttacacgtggagggtgcaggaaagggagggcccaggaccctggtgacagcccccaccaagtgcacttactgctcatgtgcattgcgtggagtcggccttgtgacagcccaggaaggtgggtgccattgtgatcaccatggaaacctaaggagggaactaaggcacggagagtgaaagccacccagctagaaggtatggagcgtgactcacaggcattccatgagtgtttgttgaacggataagtgagttcagggtggcatagctcacagctttgtgaatgggcacaagggcagggttgagctctctgaaagggtggcttcgttggactagaggcagacacagcyacttaaatgagatcgtggtaagggtagattagtttggttggatttctgggcagatttattaaacacaccatttcccctggtgtaaaggtttacctcctcacttatttatttattttttttttgccagaggctcaattgatttttttcattgcagttattgatttctgaataacatttcgactttttttccccctgaatatctcttgtgttttagctaataaatctttgacatgttgcactggctctgtgggtggagggttatgggaagtgctgagatgcagactgagatgaagataccacttctcaagaagggctgccaggcaaggctttcagatttcctcctttgttttcaagctggagtgtttcagctttgctattgttctttcccaaccatgggaaaatccagcttcatgtacagtttgctgtctgagaagttcaagctgttttaaacactgcggttcaaacaatgatctgattatccttaagaatcaaatactgttagcagtggcaaatccgtgtgggtctgcagcaactcagtgctcacctcctaagaggaaaggattcgtctgaggggcaaaaggcagagtgagagactgaggcaagttttagagctggagtgaaagtttattaaaaagttttagagcaggaagagggccaagtgtgctgtttgacctatgacttggggttttatacgttggcatgcttctgggattttgtgcctctcttcccttgatttgttttttggggtgggctgtccatatgcgcagtggcctgccagcacttgggaggggctgcgtcttaatgtgtttactgaagttgtgcgtgtgctcattgagtcgtttttcccttaccagtggagttttcctagaaggtcatactccagttaaactccatcattttgcctcttagtgtgcatgtttgagcccactcgcccaactcagatcctgtcaggaagctgctggtcatcaccttcaggtgtttcttttttctttttctttttcttttttttgagatggagtctcactccgtcgccagggctggagtgcagtggcacgatcttggctcactgcaagctctgtctcccgggttcaagcaattctcttgcctcagcctcccgagtagctgggattacaggcacccgccactatgcccagctaatttttttttgtatttttagtagagacagggtttcaccatgttggccagtctggtctcaaastcctgacctcgtgattcgcccacctcggcctcccaaagtgctgggattacaggcgtgagccaccgcacctggcccccagcttcagctgtttctattgggagactgcctttccctgatgccagctgtaaccaattattattttagagagacmgtttaataaccgcctgaccatcacctgatggtcacctgacattcctyatttggggcaggctctcctgccctgctcagttctgcctaactacctactctaacaatactatgtagttgtttatttttatttttagagactggggtctyactatgtagcctaggctggcctgaaactcctgggctccagcgatcctcctgagtacctgagaccacgggcatgtgtcactgtgctcagcatcaaatgctacatcattgttttttgctctacagctcatcctaaatttgatttgtcktctaaggattttcagagctgaaaggtatttcagcaatcatgttcaaccctcccatttcatagatgaggaaattaaattctaaggaagaaacatgatttacccagagggtcagagctgatcttgaaggagactggtttagtgaagacatgaggagtgggcaattgaatcttatgtagtgtattagttagctattgctgtataacaaaccaccccaaaattcagtggcttaaaacaaccattgatttgctcargagtttgtgatctgggccaggcttagctagtggttcttctgctggtctcacctgaggctacttagtgacttttagcagtcatctggaagctcacctgggcctgggtcatccaaggtgcctcagctgagctggttagaacagctggaggctggctcggcctctcactccacacatagagagtctagtagggtagcccaccttctttacagggtagcccagggctgccagagggcaagagtggaaactgcacggactgttaagtcacacagtaacttccatctcttcctattgctcaaggctttcctgcgacgttgctgcagcatcagtacatttgcccaaggccttgatgttcccaatgttgcatgtagtcagaggcaggaaggtcttccgagatcacccaggccaaaccttttagtttatagctggggaaactgaggctcaggcctcatccttgagcacctgtgcttttgttcccagctgcagcttgacattctgttagatgtctacaccaggcattgcaaacttaacatgactgagatggaactttggaattttctcttcagccctcttcctcactggcattcccactgtcctggctggtctttcctatcttagttctgcaggcccgacacctaggagtcatccttgatcctcctcctaggatgtctgaggctgcatcataagaagccatggagcttccatccggtgatctggtgatctgggtcttttgagtttgctcttaagatgctcatcctgggggaaccagcagtcatggtgtgagaatggcaacccacatgggaggccatatgttgacagccccaagtgaactcccagctgatggccagcatcgaccaccagacatgtgaaagagccatcttggacatccagcccagttgggccttcagatgagtgcagcccccactgctgtctgcaacttcatgaggaacaccaagarggaacagctcagctaagcccagtyagtctgcccaaccactatagcagatggtaatgaattgttttaaggggctgtttgttacacaacagtaggtaactggaacacctactcagaatctttgctttcctatctcctgtgtcctgaaagttctttccctggatattttcatgactgagcccttctcattgattgctctttgaagtcacttctcagagaggcctcttgtgacctcagagttggtttagttttgtggctgtgtcctgtttccatgtgaataagatctgttgtggaatgttggcatagctgtgttccacgtgacgtttgttttctgtctaaatgccaaaatcataatacagagacccacgtaaacttacatgatttaataatttttaattgaggtagctatgttccgtaaagtgtacagatcttacgtgttcaatttgatgagttttgacaaacatgtaaccattacacaaaatagatattggaagtttttatcacctcagaaaaaaatcccttgctcctctttcaatcagttgtccattatcttcccagcaccacacctgaagagccaattatttctgcttgctgaagagccaacacattattttagaakgtcatgtgagtaggatcatgtggtgtgtactcttgtgtttggcttcttttgcccagcatgcctatgaaattcatccacattgttgcagtaagcagtatttcattcttggattttattttttatttttttaattaaaaaaaatgtttttgagagggagtctcactctgtcacccaggctggattgcagtagcatgatctcagctcactaaaacctccacctcctgggttcaagcaattctcatgcctcagcctcctgagtagctgggattacaagcgtgtaccaccaygcccagctaatttttgtatttttagtagagacaaggtttcaccatgttggccaggctggtctygaactcctgacctcaagtgatccacccaccttggcctcccaaagtggtgggatkacaggcgtgagccaccacasctggccttattcttggatttataaaaattgcattttaatttatctatgagcttttaaatctctatctctgcattatgtttttaatggttgctctgggattatactatacatccttaacttttcattactatgaaaagtttattaattttccaccactttacataaagcataacaataggtacctgtacttcctccttcatccttttgctatggctatcgaatggattatattgatatatactataaacctcacaatacaatgtaatgatttttgctttaaataattatatgtattgaatggtcttttatgtttacccacatgtttaccatttccagtgttcttcattgcttcctgaaaatctgtgtttccattctgaagaacttcctttggcattctttgtagtgcaagtgtgctggcaatgaatccctttagtttttttaaatctgaaaatgtctttacttcatcttcataattgaaggatattttcactgaatataatattctggattgacaggcttttttttttccaagcactttaaagatgtcatcccaccgccttctggcctccatagtttctgatgagaagtcagtagtggatcaagtcattgttcttttgtttgtaatgtgtcatttttctccggcttctttccagagtttttctttatacttggtttttagtagtttaactatgacgtgcctttatgtggttttctttgtgtttttttccctgcttgagattcgctgaacttcttggatctggaaatgtatgtgtttcacaaaaattggggtcattttcagccattgttatacttttgtgcctcgttcttttgtcaccttctttgacaacagtcacactcatgggagactgtttggtgtttggcccacaggttcctgaggctgggttattattttaacttccctcctctgtttttcagatagagtaaaaattctgtcgatctcccttcactttcactgactcttctggaatttgttatctgctttttagtatatccagtgaatttttaaaatttcaggtagtgtatttttcagttctagattttccatttaatttattatttagtagtttctatttctttgctgagactacttatttttaaattcattatgattttattttcctttacattcttaagcatagtacaaatagctgctttaaaatgattgtctgccaattccagcatttggggtccatctcagttgattttttttttcttttgggttttatttattcttacatcaattaattttgatttgtaccctgaatttttgagcagtacattgtagacactctgggttctattatgttactcccaagagtattgtttttttgttataggcagttaagttggctgtactcagactgtaaaatgtcccccttgcagaaggtagcagctaaatcctccatttaattcttttagcctttggtggactgtttgacatctgtcctgagaagacagagatctgggttgacttcatacatgggacttggtgctcctcatctttcttcctcctcattccctgccagattccagtagccaagattgccccacatgctgtcagctacttcttaaggccactaagatgggagatttctatcacagttgtagctctctgaatggtgcaggaggaggactgctctcaggccaactgccacaaagcatgaaacatttggtgcttttcccttcttacatgagttggcccctccagtacccacctgcttttgattgcccttaggtgccttaggtggttactttttatattttgtccagagttcatggttgttatttgtgggagggttggtctgataggacctactttgcatttcttagcattgctagaagcagaattctcagtttttgttttttttttttttaattgccaagtagtattccactgttatgtctatgcagtgtacttgtccattcttttgctgatggatgtttaggtttgcttacaggtttttgtctgttaggaatgaagttgccataaacattatgcataagtctgtatggacataagtttttttctcttgggtcagtgtctgggacttcacacaaaactgtcaaattggttatttatggggtctcccatgagcctgtaaataggggatacaagggctaccgttcacagggaatactgtcatgaacaaaacacatacagtaaatagaaacaggtcccattggtgtcacctatactatgctagcagatgctgagtgtcagggagaaaaagaaggccaagaaaagtgatgggaggggaggcaactgggcaatgggcttctactgaaaactggctgggcaggggaggctttgctaagaaggaatatcaagggactccagggtggtggctgagtgaatgtgtgcatatctgagcaacaacattttaggcagagggaacagtggctgcaaaggccctgaggtgtggctggagtggggtgggctgaggaagggaggaggtcatgaggtccgaggagtgctggggcaggccatgggtggatgacctggggtccctgggccactgtgtggaatctgggtttgctgcagtggacaggaagctgttaaagtctgcagcagtggcatggattggaagatttggacattagtttaaggagagttgctctggacaggtgttgagaacagacagcagtgaggaagggctgagaagtgggagccagtgaagacgcttctggaatgtgcagcccagggtgacagcagtatagcagaggggaggggtgcaggtggcaatagcggccgggtctgggatactgtttgaaggcagagccagggcattagatgtgggtgtgagagaaagaggcatccaggacatctccaaggtttttcggctccagtgactggaggcctgaaaattagaatagtgcaaatgttgggtattgctcggataaaatgaaaatagaccctcattggaaggagggggtcaggaagtgtgcaaagtccctctatcctattaccctgcctggtcttttccagggtatctggaactgattgattgattgactaattgtctttctagccccctagaagaaatgccaggacctagcacaggttgggtgtggcatgtgtgggaactcaataaatgttatggaataaaaggaaggaaaaaggaaggaaggaaggaagcagggaaggagggagggagagagggagagagggaaaaagggagggacagagggagggcaggaagaagggaaggagggcaggggagggactcacccggggctgaggccacaccacagtcaccatccttcagacaccctgcctgtgtttgcttgttcagtccacacagctgcaccgtacatcacagaccagaggggagattcgcttgtttcttttaaggtgaagtcccagaggatttccccggcatatggaaagcccctgtggacttcaagttaggctcagttgtggcttggcttgacggtccccagtgaccaagaagcatagctcccgaaggtgggactcatttaccccaccctgaggggctctgatcacagatatgcttattcttacatggaaaagaaacacattgcatccattcgtcctcatcccctagaaacccactccctatcctgctccagatcgcgtggaacaggctggttcctagtgctgtttggtggccctttagacacctgaggacagagacatgcccctgggcatcttttttccagaccaaatcctcttccatctccaattcttcatttatttgttcagcaaatgctttctaagcacytgctatgtgctgggctttctgctgagctctgggrccaaaaagacaaagatactgggtctctctccttatgggacctgtcataggccattgtttggaccaggtgctccatctgtcctctggaggctgaggtcctcgtggttgagagagcagactgagggccagcagggccaggtagagagtgagtatctggaaggccaggccaccctaagccatggcttcttcgtctgtaaaatgggccaacacgcatgccttcctcatgggacaaggacctcctttcccccattgcttccttctctagatgctagcccagtgtcaacccactgaatgaatgaatgaatgaatgaatgaatgaaagtgttacaaggattaatggtgctaatgtgcatcaacctctaagtgcccatgagattctcctccctgggggatttccgaaggggcatggtcccccagctgacccatcccagtcaatcttgagaactgggctgggaaactcggagggtctccgtcagcattttctggattgagagggggtgtgatttcagcccccattcctgtattcttggtatctgctccatccctgatgcagatgaggcttgtctgttcacagggtgcaccctgtgccagcccatcaggtcccactatcagagtggttcccaggcctgatgggtgattgcctcatctgtttccagtgtctgccaattacattttatggcagcagctgggttagatgtgcagcaatcggaaaacagcatcctaggcacagagcaaatgcagagtttgggcttacatttgtcacaaaacagcatcccagatcactgaataatttatagttaattattccaacttaaaaaagccttggatcacaatgattctctcttcccccagagttgcgggatctgtttgggcagcttgcctggctgtgtggcagcaggcaggcattctgccgtcttgcccagagaggcttccygctccctgcctctcctgtgtggatgtgtgcygtgcgacggcttcgcagccctgtggttaatgtggccactcttcccgtgtcagcttttattatcatgaacacccagctccctcagggccctgcagggttttagataattcctcagattagagcaatttgtcyccagcttcagggtgtttgaaccgttaatcctggggcacctacagggtatgtaccatgcaaggcccttgggctatttgtcatttggggtccagggccccggatgcaccccaggactyggctcaaatgaacccccctctttccttcctggtcacacacaaccatgaaagcaggttctttggcaatgtcctgggtccctcctgggatgactctggccaaggtgggggtcccctgtgaygggccccttccaaatgatggtaggtccaaggccgacagcttggagtggatgagatcaaatagggttagggtgactcctgtcttctcatcttcacccttctagaataccttctgctggccgggtgcaatggctcacgcctgtaatcccagcactttaggaggccaaggcaggcagatnnnnnnnnnnnnnnnnnnnnnnnnnnnnnnnnnnnnnnnnnnnnnnnnnnnnnnnnnnnnnnnnnnnnnnnnnnnnnnnnnnnnnnnnnnnnnnnnnnnnnnaaaccccatctctactaaaaatacaaagatcatctgggtatggtggtgtgcgcctataatcccagctactcggaaggctgagacaagagaatcgcttgaactcgggaggtggaggttgcagtgagccgagatcacgccattacactccagcctgggcaacaagagtgagactctgtctcaaaaataaataaataaataaaataccttctgccactgcaatcttaattcatttcatgttgattaaggacctggtgttgttaggaacaaacatttctagcctggggacacagtggtgaaaaaagccagaagtttcctcctcctgaagctcacaactagtgggagcaggcagaaatacatggatcaacaaataattcctgtgtctaatcactggtggtgtaaaaacttggaagaagaaaggggaaggaagcctggaaggaggaaggagagtggcttggtggggaggggcatacccttgcattgggtggtcagtggagaaagggaccttgggcgcaggcagctgaatgaagtaaggagggagcccagcaggtgtctggggtaggagttgttttttttttttttatggttcaatggtccattctgtttattcagaacagtaagataaatataccttaaatattacaartttttatatacagaaatgaccactccgcagcaagtttgaaaagacaaaaaaaatcatctcctcctgctttataaaaccctagatgacccattaggcagaactgagcccttgatgcattttcgtcagcacactttggccaacattggagggaaggacaagaatgtgggaggaaaacatcacattgaaaatccctttccaatgagggtgccaagcgtctggtcttgaaggaagtaccctgcctaggcaggtgtgaaggtccagaggtaggactgtgtgtggcctgtcggaggcactgcgagaggactcatgcagccgaagggagagaaggatggggtggggtgaggctgaagggggcagggttgcgctccacagtgctccagaatgtacttcatgcctatctgattccctcaatatttcctgagccagacacctgggaggactggagatgggtgagtcagtccttcccctgggctgctcatagttgggttttttgtttagtcactcaacacacccaagcactgaatggatgaaggagtcccagctcctgaggtccccagcctagtgagggcacctgaaagcaggagtagccgcctggtttgcttttcccctcccaatctgccttgggcaccacgtcctggccacttttgcctgccagactggctgtgtggtccgctttgccctgagctgtctaacttgggtatgtctcccaagttagatgaagttccagagggagagggagagggacggggagagaggagagagaggggagagggagaagaatatgatactgtctagctgccttttctgtcaccaaaaagatcagaggtgtagattcagggacccccatttcaataccagccccatcaagaaacatggcaatgttcaaggcttgagaagagtccttttccccattgatgactgtttgagtcactcatgtccccgtgcaggccctagcacagcccgggagctcactgggctcagtgggtgggtttgccgtctgggtgagtgaactgttgctccccaacgtcaccgtgcatagacaccagctcctccaccttggagctcgcactgcagggtgtcacctcccatggtcccctttccaaactgctgaccctcattagtattcacggcacacccaatgaattatctccaccccattgctatttttttaatccttgatactttaaatttctatttttatgcatttaaaattatgaaatatttgatacatacaacagactgtatcatcatttgtgtaggttgtggagcatggtaataaattgcagcatctgtggatccgtgcttagcattgagcctactattctctgagtttctccctgcccatgaaagtaaccactgtcctaatattaattccaccattgcctggttttaagttgcatcacaaagatataggcttaaaccatctagtgttgagctgcgcaaagattttggatttttatataatggaacatgctgtgtgtgttcttcaggaacctggcttccttcatttcgtattccttgtcgatgtgtgtagggtgatgtgctaatttctatggctgtgccctgttcccttatttgcacgatcgtgtctcccaagatttggactctaagagtttcactagggtgtttactggagagaaattgctggggtttgggtgtgcacgtcagctttactgtatgtactggcaccaaagccaacagcgtatggatgctgtaagtcctcgccagctctccacattcgcaggcttttagattttgccaatctggtgactgctaatggtctctcatgtgattttaatttccatttccctgcagagcctttcatatgttttaaggcacttctcatgacctcttctagaaaacactgttccctgatttgtgcaaaccctctttttgggtcctttgacttcttgttgccatcttgaagggccttgtgtactttctctgttaatcattgttcattttagctgtggcaaatgcattctccctgcatgtagcttgtcttttcgctttatgatgattttaatgtagcagaaggcaatgctctgttgatggtttgtactttgggcttgctgaagaagtcttatcctagcccagggttataataacaagttttctataatgtcttgcacaagtttttcagttttgcttttcatggttaaatctttagtttacttagtatttatttttgtctagggtttgaggtagggattttartttttttttcttttccaaaaggaaaacaatctcccagcaccaccgagtaaatggtttacctgttcccactggtctggaacatcctctctgtactmtgccatttcctgatatgcacagtgtggattccattttgttctgtgggcctgtttgtctgtccttgcaccaatatcacacggccttaagtattgtgacaaccttgctatctggtagggcacgttttccccacttccctgccacctccatctatttctcttctgaaaataagtagctggccactcttcctcttgcacccatgatcacaccctgctgctgggtgtcctgccrgtgctcatggtgctgtttcctcagttggggtgcctcctccctcttttccctgaatgactgctgctcaggtgtggactcagatcaagcattgtccccttaaaggcctatggaacttctccatccctcaggaagagagggcagttgttgtttggcacagtctatggatcacgctcttatacctgccctgctatttactatggccctcccacccccgtccatacgtatggcatygtcacactccctgtgtccatcacagactttatttatttatttatttatttatttatttatttatttatttatttattttgagatggagttttgctcttgttgcccaggctggagtgcagtggcgcaatctcggctcactgcaacctccaccttccgggctcaagtgattctcatgcctcagcctcccaagtagctgggattacaggcatgcaccaccacacctggctaattttttgtatttagtagagatagggtttcaccatgttggtcagggtggtcttgaactcctgacttcaggtgatccactcgcctcagcctctcaaaatgttgggattacaggcgtgagccactgtgtccagcctatcacagactttaacgcacagaaggtgcctagggaatatccatgattccaaatggactcacacctagacttggctcttcttcccctaacatggcccttccctcctcccttcatcacatgttgattgtaggtgggtgttcactggaaatgcaaggatgggtgtccaagcaaagcctctgttgcgtccatttcacagatcagctctcagtaaatcccatcctcagaggcctgggctggtggggtccagatgggatgattctttggtctgattattttcacactatgaatgtgtttctttcaaagttaggaytttctttccataaatagagggctgaactttgcccccccgcaaaatatgtccaagatctaatttgcagtaactgtgaatgtgacacatttggaaataagagtctttgcagaagtaattaaataagatctcaagacgagattgtcctggttttgctctctggtaactggtcctaaatcccatgactggtgttctcataagagaaaagagagggkggttagggagatacagaggaggaggcagagactggggtgatgtgttcacaagccaaggggcaccaaggagtgccgccatggagagccgggagggggccctgggacagagtctccctgaagcttctggaaggcactggccctgccaacattttgattttagccctctaagatgcatccagaactgtgagaggacatgtttctgttgttttaagccacagactttgtggtaatttataatggcagcctgggaactcatacaccacgcaaaagttatccagcaggagaaactcggaagggccagccgaagagcctcctctccctcccggcagcagttctgtttcaaagcgccttggcatcttttagctgattttcaccacatcccctggaggaaggctcagtgacctacyatctccatttccaggtggagaaagtatcctcacctcactgtcaccctcgtgcaatgttgctttctcttggaatcactgccagagcatgggatgaacccagacctgatcccgtgcctgttccctcaccaggaggacatagagtgtgggggcgggcagggacatggctcatcccaggtgggatccggcagctgtcacactcatccccaggttgcgagcccctctgcatgccaggtactgtgccaggcaccggtgatctgggagtgcccgggacactgttttcgtgggtgctggtctgcaygggccccaggcctgccccagctgctgtgttctggggccaactgtccttccagcctcctcgatagccatatggcattccctgtgccgacgatggcttgatgtcacttgggtggacccaggtgtggcagacatgcgagtggcagagtggaccaggctgtgtggccctgatactcaccccacactgtggctctcagcctgaggacttcatgctggctgtggaggccrcgtagccccttggcagggcaggctggatgggtaggagaggcagggccctcagctgtgggatggggtgttggcaggctgtgcccaccagcttgttggcctccccaagttgctcttcctccagcaacctcgctgcgtggacagcttcccctgtcacagggacagcagagtcctcccaacagtatgttcctgggccaggccaccaccatcctggtctcagggcagcctctggacagggcagccaggagagttctctgaataaaacccttttactcaggtttccccttgcttccaccctggcagcagcagctgggtgcagttgcatgagcgttggccccaggctctccagccacactccaggaagggccaagtatggcctyctcccttcccatgcatccctgacctgtgtcccaggatgcctgtctgccctgctcccagctgatgcctccctgtgcccggggctcccacctggacggcgtgccgcgtgtgcttggtgccctgggtgcttgctggcctccacctgggctgtgartgtctgagttaggggctgggtttgtgtcactccctcttgtattctgggcatctggcacccgtgtggtccaggtggccctccgtctyggagaccagtgcttcggtgttacattcagctccttgccccagtaggatgcaagctctttgagggcaaggcctggcatgcgggaggtgctgtgttcctgtctgttgaataagtgaatgaatgattgaatgtgttagagggtccaatgtggggagagtgagggattcccctggacaccccggggagggccttcacacccatattaacccacccagcggaccaggttgacggcgatttggggacctatggtaaggaaccaggatctcctgcgtcccctgtgtttctagatactgcagggctggtatgggccccctggctgtagggctgagacggaggcattcaggctagaccaatgggtcctgccccagccgtgtcagcagagcctgcctgatcctgtccctgggtgttggccagagtgccaagaaagcacaaaagactcaggcggaaaaatcagacagaccctaaggtggtttaaaaaatgtgcaaacccaggtacgctgcaggctcgaagctgggtgtagccgaggcgtggggcaaatgagcaygtttggattaaaaaaggccaacgcatctaacagccaggaaggtttgctttaacattccagcatgttctgttgatttatggctgttgctaggtaacagaatacaccgaggctgygtgattttaaagctacggctcccgactaaagagtcgacagaaagagaaaaccattaatcaggktgggggctgggcgtggatttaaatgcaaaccagaagacagggaactgttgggagcaatgagggcgaagccaggtccacccctccgtgtctgccgtccttcaagggtgtgttccgctgcgggtgtggagagctggctacagacacgggcttctccttcaggaaggcactggcataaatttatctttcattttgcactagatcgatctagtatgtgtcagatttctaacacagcactgttagtgtaccagatgtacggagtgtgtcatcttgatgggcaggatgcattgtgccatttttatgttgcacacaactcccacctctccccagcaccatgcctttgctaagctgtgctgctacctcctgtgtggcctgcttgggataggacagtgaaaaagacagaagcccccagactctcctccatgtccacacgccccccaccccagctccctgaagctgacattctgattgagggagacagacaatagtcctgataaacaacgaattttaaagcaaagcccagaaagggggaccaggaggggtgtgtgtatgtgcgcgcgcgtgcgtgtgtgcttgtgtgtgggtgggtggatggcaggcgtgctggttgcaattgcaggtagggggaacctggttggcctcattaggaaggtgacatttgagtcaagtcttgtgcaaagtgaggggcygaggcttgcaggtatctgagggaagaatggcccaggggaggaaatagcagatgcaaagtccccgaggcagggtatgcatgttgagctggaggaacagctgggaggttggtgtgttggaatggagtgaggagggagactggggaggggaagcagatcctatagggtccccaggccactgggaggacatcattgtcttggcaggtcagaatcctaaccctgaagttcagtcccatacctggggcccatgcctttgacaggcctccctcctgccaaaggctggcttgctccttttggagcggtatgcacctgtgtcattgctgtgtgttctccaaaccccaggtctcctctctgtggtgtctcttagtttgcattccatgaaagtagtgcctgagcctggcatgtgggtgcaggcagtttatttgggatgagatcctagggcacatcattcgagtccctgctgtagggatgggggctccagtctactgagaattatacagagggctccagaactgatctctaaaaaacagcagtagttctccagggattatcagttcagatgggtggggggttggcgtggggccactgactttcactcacacttgagcatgcgctccaggcccagtggtgtgggcagaggccttggagtggaatgcagaaagacgccagagcactcggggggaggctcttatagcatcccctaccccatcaagtcttcagcaccacgaccctggacaggctgaagaccagacctccctgtctgtggggttggccatgggtaggcaggggccccggctgaccctgttggagtccatcctgggtttttggattgcagtgggtggtgataccttctctggctctggccaaggcactgtgggacatgtccttggagctgctactggctgtgtccaccccatgagagaaacagagaggagaggcagagagggtcccatggagtttaagccccagggcccactgtcagggcctggaattgtgtccccttttttgctaagctaatttaggctggctttttgtcacttgcaatcagaggatcctgattaagcctccttattgtccctggtgttaccggtccctggaggacagtagtttactcaggccctgcagcagagccagtggatggagcccggctgtattagtctgttctcgcattgctataaggaactacctgagactgggtaatttattaagaaaataggtttaattgactcacaattctgcaggctgtacaggaaatatgggtagtaagcttccctcaggaagcttataatcgtggcagaaagccaaggggaagtaggcacatattcacatggccagcaggagagagagagagaagggggaagtgccgtatgcctctaaacaaccagatctcatgagaactcactcagcatcaccagaacagcaagggagaagtctgcccgcatgatccaatcacttcccaccaggcccctcctccaacattgaggattgcaatttgacatgagacttgggtggggacatagagccaacttatatcactggcccagttccagcctggccccctccagagacctgccccatgatggcctggccttgccaccctcctgtttgaaccaatcatcacttctttggttctcaaggccttgtgggttctgatagccccactggactcaaccctctggttccccaagggaatacctggactggttccaccaccctacatggccccctggcttggcccaccatgacataccccagtagcctgccccatcttccatgcagaagctcattggccagcctgtgccaccatcatgcaggaggcacagagatgttggggaggggcaggatgaggggctgaccacctgagccacttactggcctccttgatcatccattcatccacaaattcacccaacaatacaaattcctgccacacaccaggcactagggtacacaacacagtgagcaaaacaggcaaaaatccctgtccacagagatgacattacagtgggggaaatgggataaaacagatctgtgagtgacacagagcagggccctggagcattggggctgtggcagagggtttacgtggggtggtgcccygcgttcaggagaggtctggggcacagctctgcagccaggcctcctggcgtcaggtcttatccactgctcatgtgtgacctggctgaggttgcttaacctctttaagcctcagttttcccatctgtgaaagggagacactaagagtccctacccacagggtgtgtggaagtggagtgaaatcctgcttgaggagtgtttgcccagggtgcggcatgggagcggggctgcaacctcggcttctcgccatggctgatgttccttttcagaatatcttgagagatgcagagcttccctaacactgtgccctgatgcgtccgctctccctggagtggtgagacagcatgggtcttcctccccacctcactctaggggatgtggctgatgtggtttgcagtcatgtttccccattcctctgtcccacctgtcccatctggttcccctgtccatctgtttctcaggactgtggcttcctggagccctcaaggcacgattgggtgctgttcattggtttctgctccagtatgtcctgtagtcctgatatttaatttgtgagcaatcatttttaaaattaatgaatagttaataactgtggtatggacttaatgatgactcgaagcacagaagtaatcaaggaaggctccatgaaggaagtgtcatgagaggatggcttggaaatgccagtgggaaagatgaatgccatctccctgctgaaggctgggtagagttcattccctgcagtccctttatagatggaggacataagtcccagatgagcgctcccaggaacctgcccacaaaaggcttggagtcttgttttcctgacatggccaggcccaggtgggaggtggggatgagcatcaggcctttgggcacctcttgaaagggctgaaccagctggtgggagggayggatgcctgggggctgcacacatggctggcaagtgctgtgaattattgatcactagagagcaatgtgcaggcggaggtcattttcctcctgggccaaactgctcgatcatgcttaattgcctgttttccaaatttccccaaggctggcctaggggagggattagctctatgcccatttatttttcttgaatccagtgtatggggtaaaaagttacaccatccatttctctttggtattaagttygaaaatagtggatgcaattaattcaggtggtaacaggtggtttcctgtcctacctggtatggcaaagaggtgcttctctgtgaatctcaatccccacaagactcggctcacttgttgagtagtggactggcagaatctgaaaaagttaagggcaatagagactccctgagcacccatgatgtgccaggcgctaggtatatcagtgccttcaattctcactgagataaccaaataaaataaatatgacacattaaagtgaggaattagttgaagaagtattttcaaagaaaattgtcaaaagtttgttgcaaggatgctcccactctttactgacaggcagggtatgaaagggttgaggggtgcataataaaaggagttttgtggagcatactgctttggagagggctatgctgggaatcccatctctgcatgaggaggaataggaggtacctgccacttacctgaagcccgatgtggagggagggttcagggcttaaaatggagctgctaggcttctggccaaaatggaataacagggaccagacttagcttctcaccttaaacaagtaaaaaaaatggcatgaaacaaatgaaacagggattttcaagcaattggacatcagacatgaaagtgatcattgaatgatgggaaataaacaaggtgaggccaaggactgctccagcttactgccttgagagattcctggccacgttgcagggagaggttgcccactggagtctgctggaacccccgagttgaaagaatgagctgagtctggggagatcaaagtggctggrtttcacaggcagactaatggaatggagagagctgcaaagaaagacagctctggagttatgcagaagtccaacttgagtgctcagttgagtaatgatcagcacatgcatgcaaggaaattacacagtcagggaaagaacccccaaaaggacctgtgataccagtacttagagcacgcacacagtcaggagtagtgcctgctcttaccagccagactggaaaatcttgtaattcacaggaaattgggtagacaactcaggaaagtcttgcctcagtaggaggaaattattagtcctagattgataatttctgcaagcatccttagcaaatcatcaaagcaaaacttttgaaagggtgaaactgtttcatttttgtttttttagacagggttttgctctgtcacccaggctagagtgcagtggtgtaatcatggctcacagcagccttgatctcccaagttcaagccatcctcctgcttcagcctcctgagtagctgggactacatgcacatgccaccatgcctggccaatttttccattttttgtagagacaggttctcactatggtgcctaggttggtcttgaactcctgggctcaagtgatcctcccaccttagcttcccaaagtggtagaattagaggcatgagtctccatgcctggccaggatcaaactgtttataaatgtgttgactacatctcagaacaaggctcaggaatatttataggaatacaaacaaatccagcaccctaaaaggcaaaaatcacaaagtctggcatccagtaaaaaattactagccatgcaatgaagcaggaaaatgcaaatcataatgaaggaaaagtcaatcagttaagactgatccagaattgacacagatgttaaaattagcagacaaggtcatcaaaacacttattataatcatgttctgtatgttctaaaagctagaggaaagattggacatacaatcaacatggaggatatagaaaagacataaatcaaactactacagatgaaaattacaatgtataatatgaaaaacacactggataggattaacagcagagaggacattgcagaacaaaagattagctaacttgaagacagcaatagaaactatccaaaaagaaatatagagagtaaaaagataaaaaaagaacaaaaattttaaaaagaaacagagactttctcattgagttgagacaactttaagaggcgtaatatatgtataactggggtttctgaaagagaggagaggaagggacagaaaaatatctgaagaaataatggctggcaaatttccaaatttgatgaacatggtacacccacagatacaagaatttcattgccccacaagcacaataaaaatgggaaaaaaccacactaaggcacattataattaaattgcccaaaataataaagagaaaatcttaaagtagccagagaaaggcgtggggtggggaaaacatgttatatacaaagcagcaaagatatggattacagcagatttctctagaaaataatgcaagtgagaatgcagtggaacaatatcctcaaagcatgaaattaaaaaaaagtagtcaaactagagttcatacccagaaaataatctttcaagaataaaagcaaaatagacttctgagacataacggcttaaagaattcataactagcaggcctgtagtacaagaaatgttaaaggatgtgcttcaaacagaatgaaagtgatactagatggaaatatggatctatgcaaaggatcaaagagcagagtagtaactacataggtcggatatgatattttctcttattattttaatctctttaaagtataattggctcttgacacaaaataataaccatgtagtgtgaggtttataacatatataaaagtaaactgtataatagcaaaaaggctgagaggggagaatagaagtatactattataagtaagtataagtatcttaatctatatttgacatgctataatatcacctgaaggtagactgtgataagttaaagatgtatactgtaaaccttaaaataactactaaaacaataagagttgtaactaagaagccagaaagtagayagaatggaataattgaacaatgcttaattaatcccaaagaagacagaaaaggagaaagaagggaacaaaggaaaatggaataaatggaaaatgaatatcaagatgagagatataaacctaatcataccaataatcactttgagcagccatggtctaaatatcccaataaaaagacatcagatcagatgaaaaggcaagacccaaatatatgctgcctacatgcaacccacttgaaatataaagacaagagttaaaagtaaaacaatgaaaaagatatattgcgttaactaacactaatcaaaggaaagctgcagtggctatattaatctcaaagtagatctcacagtaaagaatattaccaggttaaataaagtaatttcataatgataaagggaacaattaattaaaagttaatgcttatgcacctaatcagagacatgaagcaaaaatgatagaactgcaagaagcaatagatgaatctacaattatagttggaggtttcaataaccttctcttactaattgatgaaacatgtaaacaaaaaaatgtgtaagaaaatagaagatatgaacaacactatcaacaaactggacctggcttatatctgtagaacatgctacccaacaacagcagaatagatgttcaagtacacaccaccgaacattcatcaaaataggccatattctggccacgaaacaagtctcaataaatgtaaagggactcaagtcacaaaaagtatgttctgtcataatagaattaaattagaaatcagtaacagaaagagctctggaaaatctccaaatatttggaaacaatgaaacacacttttatataacccatgtgtccaagaaagggaaattagaaagtatttttacgtgaatgaatatgaaaacacagtgtatcaaaatctatgagatgtcgctaaaaccatacttagagggaaatttacagcactaaacatgtatattggaatagaagaaagttcctaatcaatggccttgagttccaccttaagaaactaggaaaagaagagcaaattaaacccaaagtaagcagaagagaggaaatagtaaggaccagaagagaaattggctaaatataaaataaaaacaatagagaaaataannnnnnnnnnnnnnnnnnnnnnnnnnnnnnnnnnnnnnnnnnnnnnnnnnnnnnnnnnnnnnnnnnnnnnnnnnnnnnnnnnnnnnnnnnnnnnnnnnnnnnnnnnnnnnnnnnnnnnnnnnnnnnnnnnnnnnnnnnnnaatgagaaggtaacattagtatatattcagcagtcattaaaataacaataagggaagataatgaacaacctttttgctaataaattcaacaacttagagggaatggttaaattcctggaaagacacaaattaccaaagcttactgaagaagaaatagatatcctgagtagtcctataactattgagtaaattgaatttacaatttaaaacctttccacaaagaaaactccaggcccagatgacgttactgatgactttcagtaaacatttaaggaggaaataatactaattctacataaactcttccaaaaacttgagaacactttccaaatcattctgtggggcagagttaccttgatctcaaaaccagacagacattatgaaaaaattcgtgtcctcatgtacatgaattaaaaaattattagcaaattcaatctaacaatacacaaaaaggataatacatcatagccaagtgggtttatcccaggaatgcatggtaggtttaactttcaaaaattatcaatgtaatttaccatattaacaatttataaaaacctatgctatcatctcaataaacacaaaaaggatttgacaaaaccaacctttattcttgataaaattgataaaatctgtcaggaaactaggaatagaagtgaagttcctctacttgataaagagcatctatgagaaaaacctacaggctaaatgaaagattgaatgctttctccctaagactgggagaaggcaaaaatgtctactctcagcacacattcttctcgacrttatagctagtgcaataaagcaagaaagagaaaaaaagatgttcagattagaaaagaagaagtaaaactgtctttattcacagatgacatgattatttatgtagaaaatccaaaggtatctacaaaaaagctaccagagttaataaatgagtttaacaagtttgcaaggcacaagctcaatcagaatagaagcttaaaaactaccagttatgatatgaggtaggaaggaatacatctgataaaagacatgaaagacttatgcactgaaaattataaaacactgatgatagaaattaaagmagacctaaatgagtggagagatatactatgggagtggattggaagactcaatattgttaagatggcagttccccccaaattgatctgaaattcaacacagtgtaaacaatatctgaacaggttttttttttttaagaaactgaaaaactcattctaaaattcatatagaaatacaaaggacctaggatagccaaaacaactttgaaatagaagaacgaagttggaggactaacacgatctgatttcaagatttattataaagcttcagtaatttatacaagtgatactggtgtcaagatagattaacagatcaagggaatgcaatacagagtccagaaatagatgcatgcatatatggcagctgacatagctgattttgaatagagactcaaatgcactttagtggagaatatttagataatgggtgctaaaacaattgtatatgtgtagaaaatgaacttcaatccatattttgtaccatatacaaatattcaaaatggatcatagatctcaatataaaccctaaatctataaaacttcyagaagaggaggtgaagaattttttcttaaaggaccagatagtaagtattttaggcttgtaggccatatggactctgttgtaatgatagaactctgctattgtagtatgaaagaagccatagaaaatacatgaatagatatggctgtattttagtaaaactttgtatataaaaatacgcagctggtctgcaagctgtagtttaccaatccctgttgttgaagaaaacagagtaaaaacctttgtgaccttcagttagtcaaaaatatcttagatatgacactgaaagcaggttgcataaaattaaaaattaataaatttggcctcatcaaaattaaaaacatctcctttttgaaagacacttaagagaatgaaaagacaagccctagactgacagaaattctctgtaaagcacgtgtctgataaatggcttgtatctagaatatataaaggattctcaaaactcaatagtaagaaggcaaacaacccaattaataagtggacaaaatgtctgaacagacatttcaccaaaatgatatacagatggcaaataagcacacgaaaagatgagcaacatcattagtcacgggggtaatgcaaactgaaactacaatgagatactactattacataactgttagaatggctatcattaaaaaggctgactataccaaattttggtgaggatatggagaaactggaactcttatatactgctgatgggaacgtaaaatgatataaccactttggaaactttggaatatgatctctataataacacaaactattctataaaaacataaaaagtggaagttcttcaatttatgatgttagtacaaacttgctagaaaattgcaagaaaagaaaattattaatcaatatgacttctaaacataggtgcaaaactcaaagatattagcaaaacaaatatggctctatctatcgtctatcaatcaatctatctatctatctatctatctatctatctatctatctatccatttatctatcagtcatctaattaccatgtgaagttcaccctaggaatgtcaggatagttaaagacaaaaaatgttaacttaatttacttctttaatagattaaaggctaaagtcatattatcttattaatagataccacaaaacaaagcaagcagccaaacaaaaagcatccacattagacaaattttaatacttattctaaggaaacgctctcagaaaaccaggaaaggaatttactcaacccgagaaagggcatctatcaaaacctgatagcaaacatcatttttcatgatgaaactttgaaatcattgctagaactaagacaaagaaacctaccaccactgctgttcaatactgccttgcattggaactaacgactagacagcaagtgggttaaggacagcaaggaaaagccaaaattgtgtttaattgcagatgacataattgtctacgtagaaaatccaagagaatctgctctcaaactattagaagcatgtgacagttcaacaaaattgctggacacaggacaacatagtgaaatcaatagccttcctactgaacaacagtaccaattagaacatgtaagaaggggcaaatcctatttacagtagcagtaaaatctataagacgcttaagagaaaatctaacaaaagatgtaccagccctttcggaggtagtataggagagtggttcagtggttcacagcagaggatcctaatccagattgtctggcttcaggtcatggccctactgcttcctggcttgggaaaattacttgatcacttggtgcctcagtttcctcatttgtacaagggagataataataatattcacctcacagggaagctgggaagattaattgagtttacaaatataaggtgtttagaacagtagctggcacatattaacttctatataaatggttgttattgttatgaagaaaattataaaatttaattgaaggacatgaaagaagagctgaataaatacagagatagaccatatccattgatgggatgattcaatatcagaaaggtgtctattttttcctggttaattataagctaattgaagtttcagtgaaaatcccaacaggatttcctttttactttttttttttttttttttttttgagacggagtctcgctctgtcacccaggctggagtgcagtggtgcgatctcggctcactgcagcctctgcctcccggcttcaagctattcttctgcctcagcctccggaatagctgggactacaggcacgtgccaccatgcctggctgatttttgtatttttagtagagacggggtctcatcatgttgaccaggcttgtctcgaactcctgacctcaggtgatccacatgcctcagcctcccaaagtgttgggattacaggcgtgagttaccatgccgggccccaacaggattttcaatgggatctacaaaactgaaaatttgcataggaaaaacaaaagtccaagaataaccaagacaattttgatgaaaggcaaagactgtgccatttgacctacttgatattgacttgttataaagctgtctctctacggcagggtagtactgccacatgggccagacrgaaagaccaatggaacagaatagagaatccagaaataaaggcacatgtatatgggaacttcgtatagaaaagaagtggcattttaaatcagtgggaaaaggatggactattcaatgaatgatttggatattattttcttcatatggaaaaagtatgtaatttgatcactgcctcaccccaaacagaaaagcatactgtaaatgaggtaagtatacgtcctaaaacataaaggaaggacattctgtttactacctttataactcagcgggtagacaagtattggtaaaacagaacacaaaaggcaaaatgcctgaaagataaatattgatacatttcctacatcaaaatgaatgacttctgtaggacaagaataccataaacaaagttaagacaaaaacagcaaattagaagagaatgtttgcaacatagaaacagacagaggataggtttgcaacacatataaacagcagaggatacaattatatcaaaagctctgggaagccaataaggagaaagtcacacaatccaatggagacatgggcaatgggaaaagacaggcgattcatcgaagaggaaattcaaatggccaagtggaaagattcccaaacactaggaatcaggaaatgcaaagtaagcaatcatcacatacccgttcacccatcaacttcacatgaatttaagtctattccaagtgtcacttgagaatgtgatacactgctgtaggagtgtaaattgcttctctatttggcaatgagtaggaagttaaatatgtatatattcnnnnnnnnnnnnnnnnnnnnaaatatgtatatattccagtatgcatgacccagaaggaatgtcaccagtatgactcagtggtctcgccctccacctgtccatcctaggaaacctttacactgcaggctatgaggaactaagtaaaggatgtacctgcagtgttgtttgaaatccaaaaaggttagaaacaacctaaatattatgtgggtgggtggacagcaggtagaagaaataatacattaatggtatgctcgtaaatatttaacaacctgctatccaggaaaaaaagccttaatttggagaatttgccaatttctgggatgtaaatactctgccatggctgatgtctagctaccatcgtgacatcatcaaacacagagttgggaaaagatatgcatgatcagctcttgcgagaaggttcttggggcaagctccggcacaccattgattgttttctgccagcttgcaagatcaatgaagaaactagggtagagctgaaaacataatgcttaggaaaaaaagcagtttgtagtatggtgtgatcaatatgatcaggtttatataaatttctaaattacataaaatggtacaatgcatgtatgtatgttaaggaatagaacataaataggaagaaagcactactttggggatagtgtttgcctctggaaagagaaaggaaagatgaggactaggaagggatgtaaaggaacttcagccrtatctctgtggtctcatttttcaaatgaaaagaaccgaagcaaagctgggcactttggcttgtgtgtgtagtcccagctacttcagtggctraggtgagaggattgcttgagtccaggaattagagacgggcctgggcaacatagtgagaccctgtgtctacaaaaaataaaataaaagtaaaaaagaaagctgaagcgaatatgtcaatgctaatattgattccttttgaatcaatattcaaaaggtaggggattgtaataatacattttagtccatttaaaatatgtcactaaaacaaataaaatacaaaaaaaaaaaggtctgatcatgattatgtaaaaacaaaactctacgttgaaaaggtcctgggataacacactctaaaaggtttctggcaattacatttggactcaggaccataacttttatattttcctttacttccaaattttctgtcacaagcaagtgttactcgtgcaggggcagaaattcactaaccttgagggtgttgggctggattatggctctgggcccttccacacagacttcgtcttcatttgctgggtcttggcatatttcagaattccaagacattttctctccgtccagaggcatggcracctgggttgtgggtggggtgggtgggctttcgtcttatcatttcactggaggaaagatccattgcggcactatttgcccagcctctatgaggttcaaagtggtcgaacaagccaagagagccacctggaagcttggtcctgggacctgggggtcatggaggggaatgctggcagagaagcagctaggttaggacagctagctgctgtattataccagctggtatatgggctgactataccagccctggaatcacagacctgggtacatctctggattgccacttaggagttgagtaacttgggagaaaggtgcggtttgttcatttgtaaagtgggtcctgtggttggctgtgttatagtgcaacgtattagcagccccatcctggagggagactgtacttgcacgctccgctgaggtcacgtggccatgtgaccckcagtgccctccctgcccttactgaacttgcatgtggtggttttgtgaattgtttgggccagcgacgctgtagagtgagctcaccacccctgtctctctctgttacctctgcacaaagccagccatgtgcagctccatcagccggggtcccgggaagaagataacaggggtcagagctgtagcccactcgagatgcacacgcagcaggagtgagaaatagccttgaagccgctgcgttttggagggtcattcayggctgtggtcttctagttcattccggctgaggcagggctgtcatgtgttgaggacagaatgaagtcacctatgtgaagtgctcagccaccagctggcaaagggggaggtagcaggcaggtaggtgaggatgtgctgctgtcaccaacaacccacaactctcagtgacaaaacatatcacatgcgtgtttctcactcactcagcacatcgaacaggggccctgttatttgtactcaattaaggactcgggctgatggacaatctctcttgaggagtgcttttccaagatcctgagtcagtgaaaaaaagaatttgtcaaaccctacagaggccactgaagctgcactcagaagagacgctagtcactcacctcaccttgtactctgcaaagcaagtctcatgactacacctaatattaaaagggatgggaaagtgcgaatctaccccaggcacagaaggaggcgagaagcaggatgtgtgtggtcagcactaatgacctcccctgtggccattcaataaatgctagccgctgctagagtcaccattaatcatagcatttaggctaattccaaatggagaaaaggtgagacgtagggatggcactgtcggcgggagcatgagtgtgtgcagatgtagagtttgggaagggcagctgtccagggaagaagcaacggggcacacagggagttggctggagacgcagttggggccagactgtgaagacctttgagctgagatgttgtcatatggagctgggagcctggaaacatctgaaccrggaaggggaacacggaccacatgagggaggggtgaggctctgaattctggcagagtgaggaggctggctcgaggaggggaagggctggagagctctgtgtgagtgcatgtcgacagggctggaaggaggacaggctgtggggggtgaaggcgtgggagtcgggatgactccagtgcatcctaagtgcagacaaagaggaggtccagttccagtttttttttttttttttttttgagacggagtctcgctctgtcgcccaggctggagtggagtacagtgccgcgatcttggctcactgcaagctccgcctcccgggttcacacccttctcctgcctcagcctcctgagtagttgggacaacaggcgcccaccaccatgcccggctaattttttgtatttttagtagagatggggtttcaccgtgttagccaggatggtcttgatctcctgaccttgtgatccacccgcctcagcctcccaaagtgctgggattacaggcgtgaggcaccgtgcccagcctccagttttaagagaggatgctgggtttggcgttagaggtgatgaatggctagaatcaaaatgacaatacctcatttaagaaggttgtggatcaacagggacaatcttctgttacctctttggtaaactggttgacgtccatgactaaagctaaacaaacagaccctatcactcagcaattcctagaatttcttttgaagagaatcttgctgtrtggcccaggctggagtgcagtgtggcaccatcctggctcactgcaacccctgtctccaaggctcaagtgatcctcagcatcccgagtagctcggaccacaagcatgcaccaccatgcctggctaatttttgcatttttttagtagagacggggtctcccatgttgcctcggctggtcttgaactcctgggctcaagcaatctgcctgcctcagcctcccagagtgctggtgatatgaactgctgcacccagccagttcccagaattgtgtacacatgaatgctgagccacagaattgttgttcataattagcctccacactgaacaaacaacctatgtgcccaacaacagtggggtcagctgcagtgtatttctgccatagaatattayacaacaatgaaaaatgaataaattacagttacatatatataaataacatgagtgcytctcagaaaaaaaacattgtgcaaatgaaagcagttatgaaaacattcctaccttacaatttactagtaaactagtaaaactacagtgttaaaagtcaagatgggggttatctttggggtggtgtcttagtcagtttggactgctagaacaaaaatactgtagcctggacggcataaaccacaatctatttttcacagtaatggaggctgggaagtccaaggtcaaagtgccggcagatcctgtgtctgatgagggcttcctgatttgtggatagccaacttcttgttgtgtcctcatatgacagagagagagggagagggacagagaggggaagcaaactctctcacgtctcttcttataaggcggctaatcccattatgagggccccacccttgggacctaatcacctctcaaagaccccacctcctaaaaccatcacattaggggacaggatttcaatatatgaattttgggagtcaacagctgttcagtccatggaagtggagagagaggggagtgagggaggcctcgagaggtggctagcgccctttcctgacttggtggttagatgagtgtttactttgtggtcgttcttcaagctgaacagttaacttttgtgcagtcggcttgggctgccataataaacaagataggataagtggcgtaaacaacagaaatgtacttcctcccagttctggaggctggaaagtccaacatcaaggttctggccaatctggttcatggtgaggccccttcctggtttgcaggcggccactgtctcgccgtgtgctcccgtgagcacctggggagagagtgggcaagctctttggtctcttcctataggggcactaatctctccatgaagaycccaccctcatggccttgtctaacccaaatctcccaaaggccccacctgcaaacatcatcacattgggggttagggcttcagcctgtgcacttgaggggacatggtgcggtgcacagcacactttccatgcatgttctctctgtcaattacaacaagttgggggcacagaagcacagggagacatagcctggtggggccgtcagaaggagtggagcatgtaaacctgctgagaagtggcagcgaaaggtggtgccactgaagtaaagggaggcgcatggtccacagggtgagaccacgagaactcagcatagagagaggccagcatgcgtccactggttccaggaacaggaaagtcattctcatgccgtctgacacaagtttcttttctggggtgggatggatggcaagaagccaggttggagggcacggcagtgagtgaggagatggcgagtgtagctgtacccttttggcattgtggttgtgaatggcagaaatgcaatgtgctggtggctgaagggacacggagtgaggatagcttttgaatgtggaagagacccaagcaggcttacgctgtgagaagcatctggagagatgctgacaaatttcaccttattgagctttcctctacactcacctttataaaatggcacctcctcctccccgttcctttctatctccatctccatccccgccttcatctccatctccatccccatctccatccccgttcatctccatctccattcccgccttctcctctgcaccagtcatggcccacacagtacatgctcactttatgctgtccatctcaccccactgggaggccagctccacgagagcagagcatttctctattctgtcttccacactaccctagtgctgggaacatgcctgcacatagtagatgctcaataaacattcctcattgaatgaatgaaagtacagagaggagtctgtacagagaggctgggggtggcaggatctggagctcaggctctgtcagcgggggcagggctgtgtgcagatacagatgaggaagcagcagattgtgtgatttagtggaggtggggggtgggcagggggctgagggagagtcctcggttgtgctggagggggagggcttccaggaaatggaggagacagtgtggaggagcccagacactgcttgtggtgggggtggggcaggatggggtggtgaggggtgaggaggggatggatgcaagccttggggcccagtcaggttggaaagaccacccactgcagggtccccagcatggctcagaagctgatgaaagggatgatgtactgtgtcaggccagagtggggctgttttcattgtagtccaggacatcccgggagatgaggctgatgccagcatagggtgggtgttttggcaggattgacagatagggagaggggacttctccatgatcagagagggaggctgaggaacatgcgggagggtgggcctcagcatgataacaagagagctcccaggaggcctgacccctgctgagcaggactggccaccccaacccagtggggccactcctgccatcacatccactttacagatgaggnnnnnnnnnnnnnnnnnnnnnnnnnnnnnnnnnnnnnnnnnnnnnnnnnnnnnnnnnnnnnnnnnnnnnnnnnnnnnnnnnnnnnnnnnnnnnnnnnnnnnnnnnnnnnnnnnnnnnnnnnnnnnnnnnnnnnnnnnnnnnnnnnnnnnnnnnnnnnnnnnnnnnnnnnnnnnnnnnnnnnnnnnnnnnnnnnnnnnnnnnnnnnnnnnnnnnnnnnnnnnnnnnnnnnnnnnnnnnnnnnnnnnnnnnnnnnnnnnnnnnnnnnnnnnnnnnnnnnnnnnnnnnnnnnnnnnnnnnnnnnnnnnnnnnnnnnnnnnnnnnnnnnnnnnnnnnnnnnnnnnnnnnnnnnnnnnnnnnnnnnnnnnnnnnnnnnnnnnnnnnnnnnnnnnnnnnnnnnnnnnnnnnnnnnnnnnnnnnnnnnnnnnnnnnnnnnnnnnnnnnnnnnnnnnnnnnnnnnnnnnnnnnnnnnnnnnnnnnnnnnnnnnnnnnnnnnnnnnnnnnnnnnnnnnnnnnnnnnnnnnnnnnnnnnnnnnnnnnnnnnnnnnnnnnnnnnnnnnnnnnnnnnnnnnnnnnnnnnnnnnnnnnnnnnnnnnnnnnnnnnnnnnnnnnnnnnnnnnnnnnnnnnnnnnnnnnnnnnnnnnnnnnnnnnnnnnnnnnnnnnnnnnnnnnnnnnnnnnnnnnnnnnnnnnnnnnnnnnnnnnnnnnnnnnnnnnnnnnnnnnnnnnnnnnnnnnnnnnnnnnnnnnnnnnnnnnnnnnnnnnnnnnnnnnnnnnnnnnnnnnnnnnnnnnnnnnnnnnnnnnnnnnnnnnnnnnnnnnnnnnnnnnnnnnnnnnnnnnnnnnnnnnnnnnnnnnnnnnnnnnnnnnnnnnnnnnnnnnnnnnnnnnnnnnnnnnnnnnnnnnnnnnnnnnnnnnnnnnnnnnnnnnnnnnnnnnnnnnnnnnnnnnnnnnnnnnnnnnnnnnnnnnnnnnnnnnnnnnnnnnnnnnnnnnnnnnnnnnnnnnnnnnnnnnnnnnnnnnnnnnnnnnnnnnnnnnnnnnnnnnnnnnnnnnnnnnnnnnnnnnnnnnnnnnnnnnnnnnnnnnnnnnnnnnnnnnnnnnnnnnnnnnnnnnnnnnnnnnnnnnnnnnnnnnnnnnnnnnnnnnnnnnnnnnnnnnnnnnnnnnnnnnnnnnnnnnnnnnnnnnnnnnnnnnnnnnnnnnnnnnnnnnnnnnnnnnnnnnnnnnnnnnnnnnnnnnnnnnnnnnnnnnnnnnnnnnnnnnnnnnnnnnnnnnnnnnnnnnnnnnnnnnnnnnnnnnnnnnnnnnnnnnnnnnnnnnnnnnnnnnnnnnnnnnnnnnnnnnnnnnnnnnnnnnnnnnnnnnnnnnnnnnnnnnnnnnnnnnnnnnnnnnnnnnnnnnnnnnnnnnnnnnnnnnnnnnnnnnnnnnnnnnnnnnnnnnnnnnnnnnnnnnnnnnnnnnnnnnnnnnnnnnnnnnnnnnnnnnnnnnnnnnnnnnnnnnnnnnnnnnnnnnnnnnnnnnnnnnnnnnnnnnnnnnnnnnnnnnnnnnnnnnnnnnnnnnnnnnnnnnnnnnnnnnnnnnnnnnnnnnnnnnnnnnnnnnnnnnnnnnnnnnnnnnnnnnnnnnnnnnnnnnnnnnnnnnnnnnnnnnnnnnnnnnnnnnnnnnnnnnnnnnnnnnnnnnnnnnnnnnnnnnnnnnnnnnnnnnnnnnnnnnnnnnnnnnnnnnnnnnnnnnnnnnnnnnnnnnnnnnnnnnnnnnnnnnnnnnnnnnnnnnnnnnnnnnnnnnnnnnnnnnnnnnnnnnnnnnnnnnnnnnnnnnnnnnnnnnnnnnnnnnnnnnnnnnnnnnnnnnnnnnnnnnnnnnnnnnnnnnnnnnnnnnnnnnnnnnnnnnnnnnnnnnnnnnnnnnnnnnnnnnnnnnnnnnnnnnnnnnnnnnnnnnnnnnnnnnnnnnnnnnnnnnnnnnnnnnnnnnnnnnnnnnnnnnnnnnnnnnnnnnnnnnnnnnnnnnnnnnnnnnnnnnnnnnnnnnnnnnnnnnnnnnnnnnnnnnnnnnnnnnnnnnnnnnnnnnnnnnnnnnnnnnnnnnnnnnnnnnnnnnnnnnnnnnnnnnnnnnnnnnnnnnnnnnnnnnnnnnnnnnnnnnnnnnnnnnnnnnnnnnnnnnnnnnnnnnnnnnnnnnnnnnnnnnnnnnnnnnnnnnnnnnnnnnnnnnnnnnnnnnnnnnnnnnnnnnnnnnnnnnnnnnnnnnnnnnnnnnnnnnnnnnnnnnnnnnnnnnnnnnnnnnnnnnnnnnnnnnnnnnnnnnnnnnnnnnnnnnnnnnnnnnnnnnnnnnnnnnnnnnnnnnnnnnnnnnnnnnnnnnnnnnnnnnnnnnnnnnnnnnnccctgcccggggcccaggagggagggagcccgagggtaccggcctccgctgcccagcgccggcacagggcagcgccctcctccgcgccgccctccgggaggcagctttcctctcccaagccaggtggcatcctgattcggccctgaccataattttttaaaaggccacggctgtggctaatctggtgaagaaatctcggggaaatttaatggtttaaatcctggatttgccatttcagccctgcccaaagcccgcagaattttctaggctgccctctccctggagaagaagagggacccgrggggaaaaaaacataatccattgccagatcctcctgggaggcccgcctgcccgggcccctccctgtcctccagaggcagggtccctgagtgggagggagaaggcggctggtttggggctggcctttttattcctggtgagttatattgagacaggagcagctgggctaactgtcgggattttccaaaaaagtgggacatgccatcccaaacaggccctgtttaaaatcccctaagttggccctacaagcccaacccccacccccaccctacccccgaggctggtgggtcagcgcccctctcttacaggcctggaacttccgggggccccctggtctgcctcgctaggggaacagtggggacagcttccgtgcgcaggcagggcccgcggagtgaccccgatggaggatggggaccgggaggtctgggctcggggccgcctgtgctggagccctgcccgagtgcggggactgtcagccgctaacccacgggctggcggcccggccgcagaagtgtgcgcggattccccgggtgggtgccccagtgggaggggccctgggcacgggtcccgcggggcaggtgcgcgtgggtgcctgtgtcagggagaccgagtgggccaggcggcggagaccgggctcctgcggctgggtccgcctcctcgaagcctggctctgccggaaatgaggccgagcggagccggagccccgcggaggcccggggagcgcagcgcgagcgcgggcgcgggcgggctcggggcgccctggcccgggaggcagaggctgggcgtgggacctgggcggagggaggctgcgggggccgcgcccgctcccggcgggagaaccgctgagtcacgcacgcttcgccgccgggtgtgtgcgagagaggggcagggctgcccgggcctccgggccggtggggctctgacccggccgcggctttgggaggcccggggagctgagagcggtcctttgtcgcctgcttcggcgaggctgagtcgggatcagcgtgggtccgggatgtggtttctgctcgcagcctgcagcgacagagggttggaggaagccgccgggttgctggcccgtgcctcggtggcctggctcgggccgagagcggatcttggcaggttgccccgctgctcccaggctcgctgtggtctggcttcctggagcaagcctctgtttgctcatctctacgttggggatgacggtgggatggggcgcagggctcgttgtgggaccaggcgtaaaaagcgccatggtggacattttcaaacattaattccctctgcaccctgcccgtccccttttctttcataaattcaccagccctcagcagggcacaggaacggggacggcacagttctggaggtcagagcagtgctatccaatccttcatccagacacgagatatttaccgagcacctgctgcatgccgggcactgttttatccctggggactggacaaagactccctgcccttgtgcggcctgaattctatcagggagctatatgaccttgaggtctgtcttctcaccagggctcagtctccccatctgtaaaatgggagtgaatcctgcctacagggtctggaggtttctgtgaggagcaggtgcaacggtgttgaaggagccgttcagagctatgcattgctaacgtgcagccaaaggatgctgagcacctgctgtgtgctgggacctcatacgaaggctcacctacgccttatccccaccttgagatgaacaaaccaaggcctggccttgtgcctggtccagaccgagtgccagtgtgtgcagggcatagggctcaggtgctgcggatgcagagagcaggatcggaacaagaaacaataataatcattataataggtagaattctggcctccctaatgaaaaacacactttcacactgttgcatcctgactatatttcatgctcagagcacagggaaggtcacagatttgaatgtcagaatgtcagacttgaatcatgttaaagtcctgcctctgactcctgactgctgtgcagccttggacaagttactacaccttcctgagcttcactttccctttgtaaagggagaaataataacgacctttcatacagggttgctgggatgatcagtgattttgctaatatcaaaagtgcccagcacagtgcttgggttgttggaggcattgaacacacggcattgttattatttatatgccttgtaactggaagagcctgtgggcaaacagtggatgctaaaattcagtttgtggaagaaccaggtgcacaaactcctgttctacctgtggttgagtctacactcccccaccacaccccagctgctctgatctacctcctgttccttgagcaggccattttctttcttgcttcagggcrtttgcaatggctgttscctggaatacccacctcctgcctttctcaccactgactctttctcatcctttgggccccatgtccaatgtcatctttgcccgtgggagccctgcttgggttcctgagtctcttgtaaaatctcaaacatcttaggaagagtttaggttttgttagtcattcacatcttggtgtgaattcgtcagagcaggttggattttttttttttttttttttttttttggtggcagggctgggtggcttactcttggctgggctcaactgcattgagggttatggtgatgattaggtgtacctgcaggccacctgggggcacagagaactttgcatgaatggggtcagggtgtggggagagcagtgyagctgatagggcactggrccctggrccctggaccctggagggtgctaggaagtctccatctagttagacatttctcaagagctggatatggttccaggaaggactcttcctggctctgttctttctctttttgcggcaggcctcagtacttagctttagagtgagttgaataagcacttccagactagactgaacttacaaaacccatccatccttcctttgcttagcaccatttgccaagcacatcctgccctgggcagcagtgatgaccaagayacaggagctcagccaaggggaggtrgttcaggctgaccaggtagatcctggcagtgactgggtctttctggggagcaacagtcactctcatgtgcctgacaggtaaggcacttccggagcacacttttcagctgaggccagaggcacagcttccccttgtttgagcatctcagccatcacacactgttggacactcatgctttttgcatctgcataaaggatgtacccatgttttcctaactcccatccctggatgtcctgtgtgatttcagagtagtctgtttattcccacagagttgtcctgattttatagttgaggaagtgaagggtgcttgggaattgctaaggtcatcatggggtcctgaggctgtctgaacgcagcaggcaggcaggttttcctgcatggaattgtctgcaggttttgaactggttgtgccctggataccatctactttctgcccaggaaaccacactgaagaggggatgctgcttgtgggagactcagcattcagtgaaatctgcacccttatggtggacgttgcagctgatctccacaacagttagtctctcttcttccaaggagaacacatrtggttcctagtaagagatctcaggccatagctggatgtgatcagtgcaaggatgatctcattccccttgcagtgactggttccagaatggatgtgggagtcagttctggaggttgagtggaaagtagggagaaccacaggtagttggtccctctcttgtgatgggaacagggaaaccttgtggtggctggcagccatctgacaccatgaggggagcaagtcttaggccaccaccgttgatggcagggcagagagtgagtgagatccaggacatagaggcctgatgtccaggccgcctctgaacttccagttacatgagctgttacttttccttttcgttgtgcactttcaagtctccrttacttgcagcccatagcaccccaactcgtacagccctgactgcttatcaagaaaaccaggaggctgatctgtaacccacagctaagactcgagatacataaaacccagagggatttttgtttgctttctgttttgagaaccctctttcatttcactcaagtcaaggttgccaatttctggttttccctcctcagtcctattgaggaggtatttttggtcagataagagagcctgagatctggcatcgggagatctgggttcctggtggggtctgaccctgggtctgtaatattgggcaggtcacacggtctctctgagcctcagtttattcttaatagatcagtaagtgatgatgtctattctttaggggccagagttagactagcccttagaactgtcatcagactggctagcctaacttccaccccaacctatggggaaactgaggctaagaggggggacattagtggtggcacagagggagattagggagagtcagcctttgacttttgaaaatcaagatgtggactgttcagattctgtgttcctttcgcttctgtttggaaacgccacttacataagcttcccttgggcttcacagcgartgtgggctccatttcagtgctggggtgccctccatcaaatcacatcactttctgagcctcagtttccctgcactgcctggtgccctgggttgtcatgaggctgtaaggagccaagggcatgtggactctgaagttctacacgtgtaaaaggcgactgctgtcaatttccccaaattgtagtgtaggccarctcccacgcccctgctgtaagcaatgtgctcctttctttttaatcaacccgaacttaaagcttggcgcagtcacagagcacggtttttstcattttctttctggaagatgaaaatcaaattctaataaaatttttccactccatctcctgactgttgtcatttgctacactttttagtgtttatccttaaagcttgcagagctaagggatgtttggtaagaagtgtttaggccttgagactggaagagccgctgtatgaagcgctaggctccatggagagtgtgatggggagtaagagaaggagagtgaactcctgtgagtccaccaagcagagggacatactctcagcaactggggtatttccttccagtctttttttaatgcccatgtctgtttttaatgaaaactgtaatctgtctgtatcaacaattttgaaggctacttttctagtttggcatgagattataggaattttccagggctttgctccagggctggcttcatggatatgcaacctgtgtggtcatctaggtccccacactcagaaggacctgtgcttgggttcatgttctgctgttactatcttgaaatttttaagaatttcactttggatcctgtgttttgtaagcgaaatctgatgggacgggggagcctgggaatgagcagaggggtacgtgcggcaggcgagtctgtggttacacayattggctcccacagcacgctaccctgtgttcacttgagcgtctgagccccatgcacagtggacagctcatgcaccttctcagtgcgtctgtagtttcacaggcaggggccatgctttcaaataatgctccaaggcattgatgttctcatgcagtgacttctaagaaacatgaatgacgcaggaaccctatggtgtcctttcttaacgtgtgttacgtgcccatatttgccaatcgctgacactgaaaatgattacacagaagggaagggaaaaagagggcacctatagttccttttcctcctagtccttccttgtttattattgaaccaagggtagagggtgttggaagaatgtacacatatccagaaatgaaataagaacagttaagttagtttcctctgctctggtaagaacaaaatccatatgcgaaatataacttgtgcattttggtgagtctacattccagttacgtgctcttatgtttgcatttaaaattggaggtgcacactagaatggtgagtgataaaatgcacgctragagtttaagcttttttttttttaaatttgaattgacattaaatagcaaataacaccatgacaaaatatggaaggcatgaaaaggctttgtatcttagcacctttaatgatgcttttcctttgctttttgaataagaggctctgcattttcatttttccctgtgccccacgaattatagggttggccctgctttgctggaactctgggtagggtgaactccttggccctgccttctacctccttggctttcgtgattggtggaaatggtgagagcctgccatccattgggcagctcttccctatggggaggggttacaatattaaatgtccgtgctcctctctcacccattgggtccatgggcctctgacttccaggttgctctacaggggagaggccaacagttatcttattttacaagctagaagttagacctacctctccccgcaggaccaaggggtggggaggtgaagtaggggtccatagctcttttttttcctacaggtttaccattaataaagcagatttttttattcctgtcttgcggccagtcttttctgtgtaatcccaagtcccagcaaggaagaggggtgactggttaccttggccccgcccccaagtcacacagtacacgtattgacaaccatcatttcattggctgcatactattcctgtgatacatgtgtcatcattcagtagttcaattaatcatttccttatggctggatatttagttccctcccttccctccctccctcccttcctcccttccttccttctctctctctctgtctctcccccacacactttcttattttcataactaacactgcaggaatgaacaccatttgtgtgtgtgaagaccccctactcccatcgttcccccttaaccttggaatgatgctcttcagaaggaattccacacgtgctatttcatataaagatcactagcatttttaatgttgttgacacacattggcagattattctccagaaagtttttctctttaaccacatgytgatcaacattaggtagtctaatttgtttgacctttgcaaatatcaaagatgaaaaatatttrttgtaattcacgtctgcataccaatgaggttgaacattttttccttttgttcagcgggtattggctgatccctgttatgtgccagggtgacattagattctagacatacaaagttgaagagcaaggctgtgtctgccttgaaatgtggactctcctctcccagtgtcttgggtgccactgcgggacctagctacttctcaggagagagtctgaagctgctggaggagtctgtacatmcctcagcaccctggggagtcctgttagttacacagggccttgcaaagacaggcatctcaccattaagcccttgagcagaatgatccaagtggactttaggatgaaataattacaaaacaaacacaatagccattattatgattcaccatttattggctatgtactataatactatatgctggacatgaggctgcgtgcatctcattggtgatgccccagacctgatgttgtgtatattatttccccattttacagaggagaaaactgaggctgaggtgcttgttcaatgtcacatggtttgtaagggacagagctgagttttgaatgcagcctgccaaacccacgctcctgactgctacattaattggctgggacccacagggcagggttaggtggcctgttcagttctgattatgcaccacacttaggagrttttgggatttgaactagactacctggcttggtgctcttgctatctgtgttgcratgaaaggcaatcgagagggktcagcaggaggagagacccccttcacggcacaggtagatggcagtggcagaggccacaaktggacacgtggtccagggactgaagggcaggtggcatttccaggttggggggtgatgatgtgctgggacatggtattctagygcattctgggcaggaggaacggtgtgtgcaaagtggcataacacttgtcccctgacagtgtccrgctcctctgcttgagaccaggaggcagttagttagttgccagccggcccgggagcaggacacacctgggggcccctgtgctgcccaggacaggcactgccctccttgcacagtgggggccattgtcctccagaacccagggctgaatgtcccattgaggcagaacaaaggctgctcagaggttcccagctggggtgtgggctgccscaagcagggatgggatctccaactgcaggccaagggcctcctccaggctggcctggcctcctgcagccccacccccacccctcctcaggaccaggactgttgctgctggaggctggacctgggcttgggctcccaggcctgtgctctgggtctggcacagctgccgtgcccttggcagcttcttcatcccctgggcaatttccccatctatgaagcagagagagagcgagctcccaaccagcaaggctttcaggcagaattgaatgaaatagtgcacactctgtaggttaatctcaataaaagggagctctttcatgatcatgattagcttctgaatgtttttttacaatttcaaaaaagttttgaygcaaactttcaaatttgtgccacttctgggccaaagtgtttaagaagggagtgcaccttcccccctccctctktcccagagaagggagagatgccgctccctggagcccctcatcactctgtggaagggactgctggccaactgttacaagaggagaaacttctttgcatttgtgagaaaatagtctattgaactgcttccaatctatcaagatcttgctgtacttccttcatttactctcccctgcttttggmtgaagaatttttaggcaaatccaagactcctgtcrtttccccgttccatctgcaggcatctctgagtgttgagggcatttcttgtagcccagtgctgttatcccacctcacaaaacatatcctgattctttgttacctaaattctggtccattttatgaacgtccccagttgtctgagaaatgtctcttatggttgggtggtttggcccaggatccaaagtcctgcacctgcgtttggctgttctgtctcttgtcttttctgacctagactcagcctccatccccttttcaggctaccaacttgttgaagacatttgttattattttattttattttttttaagacggagtttcactctgtcgcccaggctggagtgcaatggcgtgatcttggctcactgaaacccccgcctcccgggttcaagtgattctcctgcctcagcatcctgagcagctgggactacatacaggtgcccaccaccacgcccgactaatttttgtatttttagtagagacggggtttcaccatgttggtcaggctggtcttgaactcctgacctcagataatctgccttcattattattttagagattacagtgtcactcccactgtccctaatttgtgcctggattccatttgccctgtgggtctggaaggctgagaggtggttgctgggacctgggcatcggccttggggctgcccctctctcctccaggacccctttctgcagagtggtgccctcgccactccctggctgagtgatcttgggcaagttgtccagccaggccgtgcctgggtgaccacatctgagctgggggtgagcgtggctgcamcatcctctctgggatgtggtgggtgttgaatgagatggtgcatgccacgtgctccgtgggcctggtgcctgtgggtccctgtcttacccccatgatggggatgtggcaggaactggggtagccaccgcctgcccacacagtgctcactttctgtaggggagacacccctcagctggtcactacatacagcaggaccagcactttctgagggaagagggatgttctcttgggaagtctggatgctgaagacagtttgttamtctgattaataccagttacaaagaaacccccacattccaggggttgatgtcatagaagtttatccctttgtaacagttcattgtggatgatcccagttggcccaggagtctcttccacagagtgatgcggggctccagacccttctcatctgtcagctcccatgtcctctccattctccggggaagagggtatggggaaggtgcactccctccttaaacactttggcccagacatggcacttgtgacttccctcacattccattggccagagctagtcacatggccccacctaatgcaaggggctctaggaaatgtagtccctggctgggcagcccagtggctactctgcagtgggaagaacctgcatcttggtggrtgtcttgccatctttgccacatgaccccacaaaacaaacctttacattctcagtccaaaaaaccctactaagaatcctgtgctggagacaccctcactcaacccctgaccctcccctctccctgcttcagtgtmcacacgtgcacggtgctgtgagatgcagagtccagagtcatgcggtggctaggaggtcagggacgccttcctgggagaggcgatgtctgagctgagtctgcaaagccaaataggtggtgcccaggtggatcaggtaggagagggattccgggcttcggctgcagcaggggtaaaggctggtgtcttgggagagggcatcctgtgtagagaggggtctgtgggccactgagatttagaggatgtgtgtggggtggggtggagtgggagaggagctggagcgggatgggaagtgggaggcaggactgtttgtgaaaggcttcaaatgccgagataaggagtttggattgtatcctattgacattgtggaaccagatggagatggggcatttccctttgtttgaaagtattttgatttctattggctgtcttactacaaaaaacatatgtagtcatagcaaaaagttcagaaaatttagaaagagaaaaggaggaaaagaaaatcctaccactgaaaatattttggtatatgtgtttttgcctatgggtatacatactatctaggtatatatatattcctacatttttttattcactgaaagatggtttttgagcatctactgtgtgcgtatcctattttgtaatctttaaaattttctcttaatgatatgggagctttctagcttagaaaataacacagcccattttcttagcttgctgggacttctataacacagtgccacataccgggcagttgaaacaacagagacttaccgcctcacagtgctagagcttgggagtccaagatcaaggtgttggcagggttgattccttctgaggcccctctccttggcttatagatgaacatctccctactgtgtcttcacatggtctttcctgtgtgtgtctgtgtccttagagggacaccaggcatattgagttagggctcatccatatgactgcattttaccttcgtcaccttgttaaaggtcctttttgtcaaacacagtcacattttgaggttctaggggttaggacttcaacaaaggaatcttggggagggggcacatttcagcccaaagcacccgtcatcattggtaatatcagtcacatgcttcttctatgtattttaaagagttccatgctggtgggtatcagaagttatggttggtttaggatcatgagcagtgttgtgagggcatctttgcacctttttgcgtgcatatttggttatttccctagggtgtggaatggctgcttctgagagtttggtctttctgaagtatcttcatctaatgtcaacttttcctgatgaccaaacttggtactaacaactccctttccccagagcattgctagtggcgactagatccaacatatttaatatttgccaatattatggtaaaaattgctgtttttttktgtgtgtgtgacagaggcttgctctgttgstcaggctggagtgcagtgtcgtgatcttggctcactgcaacctctgcctcccaggctcaagcaattcttgtctctcagtctcccaagaagctggcattataggctgtgttcttttaaagcatttttcagtgagattgaacttcctttattatatttattgaccatggcatatattcaattgtaagtttttttgtgcaccgttcttggcctgtttctctactgtaattgtcatctctcttgcaaacactgacccttggtttgttgtttctggtagcattgattttatgtggttagatgtcatgactcttgtcctgctgagcatggatctcccattccacaatcatgagaagaaccaacaatatggaggaggtgacaccgtgtagctttggaggctaagtaaaaaataggtcatgtgcttctgccttggagccagccaccatattgtgaggaagcccaagcagtttgtggagaggyacatgcagagaggaaccaaggtcctggttgagctgcctgccyaatatccagcaccaccttgccagcaggtgagtgagccatcttacaggtagagcctccagccctcaggcaagccatccatatggaacagagatgagccattcccaccaagatctacccaaactgcagattcatgaaccaaataaatggtttctgcttgaagccattaagttttgaagtgctttgttacacagcagtgggtaactggaagagtcatggattcctgmcattgaattcctggtcctcctccttctcaggctacttgtctagatgttctgttctctccatgattctgtggatccctcagagccttccggtaacttccttctttgcttgtgttagcctgggtcaatctctgttgcttataactgacagacatgggaaaccagccccagcaatgagaggtgacccagctcagatcatgagacaggacaggaayccaggcctttctgaaacatagcccagggtcccatcccacaacgtgtcagtagacaccatgcctgctgggtcatgcctgcttccgctgcaccctgcacccagctcagcacctgctatcttccaaaggccattgctgattgcttgtacacacctgttagttcatgcacagacagcaaagcaygtagttgtgctgcctccttgccttcctgctatgatctgaatgtttaagtaccccctccaaattcacaggttgaaatccagacccccaatgtgagggtatttaaaaggtggggactttgggagtgatgaggttgtgagggtggagccctcatgggtgggattagtgcccttataaaagaccttagagagctcccttgcccttctgtcaygtgaggacgcagcgagaaggcactgtttgwgagtcaggaagttggacctcagtggacaccaaatctgctgtgccttgatcttggacttccagcctccagaattgtgaggaataaatgcttgttgtttataagccrcccggtctatgatattttgttatagcagcctgaacagactaagccactcccagtgatgagcctgcatgatgttttacacaaacagatcactgaaagaaggaattggccagcaaagatgatgctcagcagagatgtgaaagatgttaatgctggaagtgaaatttaaattggaggtaaatggagtcatagaagaaatccatgatcttgggaagctgaagctacccttcaagaagctcttatatgcagccagaggagttgagtgaaggtgaacacactgatgtaaaccaggaaaggagttgtgccccaaagcatggagatgtcccagaggaagcgaggctgggaaaaacgttaaaggaactcttgaagatatttcacagtgttgaaagtgcaaaggataaaatcttggaagctggtctggagaaagataattctgcaaagcatagaaagggtgcttttttggtatcgtaaggtatacaataacagtagcgagcactgtgcaaactctctccatatgtcttttacaaagaaataaagcacttgacatctcaatgtttctratgctttaaattacattgtaccaaataaatattagttgtactattttaaaaaaactttcccggttgggcattgtggctcacacctgtaatccaagcactttgggaggctgaggtgggaggatcgcttgagcccaggagttcgagaccagcctgggcaatatagtgagaccctgtctcttcaaaaaataaaaaaaaattagccaaggatggtggcatgtacctgcagtcccagctactcaggaggctgaggctggaggatcacttgaacycaggaggttgaggctgcagtgagctatgattgcaccactgtactccagcctgggtgacagagccagaccctgtctcaaaaagaaaaaaaaattcccwgtgcattccctatggacatttgtaactgtccataaaagactttttaatgtcttgacaaaaaattttaaaggccacagaagaattgtaatttcctcattgattattaggatggctttaaatggttttagctttcatgctctatttttttttttttttttttgagatggagtctcgctctgtcgcccaggtcggggtacagtggtgtcatgtcagctcactgcaacttctgtctcctggttcaagcaattctcctgcctcagcctcctgagtagctgggattacaggtgcctgccacggcatctggctaatttttgtatttttagtagagacggaatttcaaccatgttggtcaagctgatcttgaactcctgacctcaggtgatctgcccgccttagcctcccaaagtgctggaattataggygcaarccaccgcacctggctcatgctcatttttatggatccacaccacccgtacagcaaggactgcctgcactcattccaagtggtcagagtggtcaccgcatgggccctccacgtggccrggccacagtgatgtttcaaaccctggctgggggattgcattcaatatccccttattaaaggcggcagctcaagaatattaaatcatgggaattcctcactgtggaagtgggaaggcagcccgtggttcaccgtgrggggcacccagagctccccctccactgcgttcagtgtgcagccctccagccagcctgtctgcttcgggagcaatccatcatggaatgaactgaccgaaggagcgaggggctgaatgatgtggttcctacgccgactttcaatgtgaaaggtgataaaaacagccctgaatattttatggccccaaggagaggtaaggctctttattgaagctgtgaaaatataatccatcatgataatgtgtcccatatcgtcagactctgcgagctaagttgtgtgtatgttaaggtgctctttttgagaagatcttaattttatttctctattttatttcattacagaaacgtttgaacgtgtagacagtagaataaagggggggggrataacatccttcatttcactactccagaaacactgctcacattttgttgcatttccttctaactaccccctgcagattgtactatgttttgtgtcttttaaaatattaaatgcactgtcaacattttcccagatcatcctgcactctgagttaacaatttttattggctgcataatacttcacgatgtaggtattattattcattcaataactatttatggattcattgatccgattagtgttgattgtctataacaggtgtgtgggtggggtagggggattcaggaagaaggaatagggcgcagctcccccmccccaggatttctggaatgagggagacataacagatggctgtgatccggtgtgaggggcagggatgcagtgggcccggttgcagcctgggagcaggtggtcagagatgaaaggctgtgggcagcagtggttggtggtccacagcagtaggcagcagggggagggggcgacattcatggcaggagggacattatgggcacagcacggcgtggtgtgttcagggttggtggagcgttcacttacagtcttgcagatcctggcaggtgtggtggtgatctgtccaggcaggggagggagagggaactgagagtcatcaaaagtctctgggagtttggaaaggagagtagggggctcagagggagtgtgagcacttccagcagaggtgagaaagcccccagtcagttgcccagggtgggcagtggaagggaagtggaggtgaacgttgtggggtggagagggttttcaggcaggctgggagctgcccagtgtgctggaggaaggctgggtctccttgaatggtgtttggtcaatgcaagaccacaggagtgtgactagaaggctgggggtgcagatggtggcaggtggaggayrgagagagctkctcccactgctgaacaacgactgccccaactttatgggatgagcattcttatgaatgcccattgtcctgtattccagattattcttgtgtctgtccaggtagggatgcaatttcttgatgtarggctataggtgtttttaagggcttgcataaagatttgaatatgatgttgtctagtagagtaaaaatcaaattgggcaaaacatttttgtttgggtgatttttggaagagtaagtccacgaatgcaacgcagctctggagtcatctgtagattacagcaagcccatcagtctctatgtctcttgcttacaacaaaggattgatttcagctccagcactaggtaggtgacttrtgctgtgttcattatctcttgataggtgtctgacaggagatggggcttgggctgtgccagggaggagccgtgtggtgcaccacctatctccgcaggcataactattttgtcttcatggcaaaataatagcgatgatggtgatgaggagggaagctaccatttcttgactgctcctgtgtaatgacatgttggtgatcacattagggctttatgtccactctgggaggtggtgagaatgacatcgcgtttgcacatcaggacgctgagcctcagagaggttgagtcccaggacgaaggccacacagtgagtgccacaggtaccattaccacctaacaaatgactctggagctcagtgatgtgatgagaaccattttattctgtctcctggattctgtgagtcaggaatttgggcagagcttggctgggcaaaccttctgctctaaatggccacccatgagtcttccaagctggtgggtggactgatctggagggactgagatggtctcactcacacattttctgcggggtggggagagttggaaggcggggctcccctccccagcgtgcagtctcagggcagttggactcctttgatggcagctggctttcccgaatcaagtatccccagatacccaggtggaagctgcttggcccttcctgacccctgggacatctcagtgtcaattgtgtcaccttcatttagttcaagcaagtcacaggccggcccaggttgaagggcagttggactcaacctttgcatgtgggaagggccaggttacatggtagaaaagcagatgggataggagaccgtgctctggccctccctgggaaacacggtgtgccacagacgccctgggcagagccaagacccccactgggctctgtctgaccttggagccactgccccgctcctgagcaacaccctcttgtccccctgaacagtcacaggaagaacgggtccctctctccatgccattttcctgttaaaaaatgcaaaaacatcccatacttttgctcatttaaacacagaggaaaggaggtgagtgaaagctttctttaggggtagattagatgtgaggcagaccggtggccctgggtgtgcaccgggtggaaattattcttacaaacagggccgggtgggggtgcagcctgccaccgcccctctggccgtctgcctccacaggaggcttgcaggtgcccacatcagccaacgtggccctcggtggggctgtgcttgccttcttgccagggccactgcagtagggaggagtgcagagcagaaacaggtgagctgggctgaattttctgcttggctaattcagtgtggcttgactccaagaaggacacaccgacctccccatcatcttgtttgttcagccttgcagaagcagttttatgagaaaccattacagccccggtggtctgggcccagacccggtgcacaccacgtgcccgcactggtgcggggggaccattctcggtgaatatgatggatgcacaggaagccgccctgccattcagtgagagctcaccatgtgtctgcccctggggtggggtggggtgggcagtttccagcctttgcccatgggatagagctgctggaagtctccccgagctgaggaggcagagctggggtggctggggctgggggttgccatggatacttcctgcaagtcctgacgccgctccttcctctttggggatctgtctcccatactgtccctgctgcctttacatcttcagggtggagagggactctggccatcctggggccaaccatcctgtgtcactgctggtgtttgtgacctgcggtgggccctccctcaactccgtatctccagctctaagccagagacaagaatatcctctgtgggggggtcccttcaagggtggatggagatgaggcgttaggtgtatccgatgctcaggaacggccccgcacctgctcatctttatgatgagcagtgggactgcgggcagagggagccacacgcatccatcctggctctcagcatcccagggaaagatgttctgctctatcctgatcagcctcgccctttaaccaaccacaggctgcctgcagtgtggccgtggggagctggagtcaggcatggtggcagcccttctagacagtaggcagtaggtaagcctgctgatcacggagccgagattctctgtgggacagagctggtccccagcatccctgtggcctttgggccaagaactcagtcggctactttgcttccaggcttgggaacactcagggtaggctgggagtcccctggtctcaccctgtgagccccacataagcctgtggatagcaccagctcagcaggtgaccccctcatcaaaaccccaaactgggatgcttctctggctacataggcatggccacatggggacagtgggaggacatgtgataatttggggcagcrgctgaaagcctaggggttagggctactgtgtccttctaaggtggtgcagggcgcacagccctctgggcctcagtttcctcttctgtgaaatggggactctatcttggggccgcaaatgccagtgtcttctctggaagaaagggcgactgctgagggaagcagcacacaggtgtgagggtccaggccccagacgggatcccacaaagacctaggacagtgagccaagagtggagagaggggacgagggtggactggggtgggccccaggagctggraagtgaggaaaatccagctgtgtcctgagggttagactccactgccartgttcacaggatctggagctgatgggracctgcggtgtcaccctgaagggacagatggcccccaggctagcaggaggtggcagtgtccgtttggcagcaacatttgacaagcagaaggcagttggtccctcctgcttcctgtccaggctcttggggctgggaccccactcccagccctgtcctccccaacctccccacacttacacaggccactctggggcagaggaggggtgctgtgatttgtgggtttgggagaagttggaagcataatgggtcaggcctgcagctcggtccacactgcctgtgccaggtggagcaggtgagggcatccctggctctggggtggtgtcactgttcacactttgtcctatagccaggcccttcttgggggtgagggttccgtggagccctccatctgcctggctctgccgatccaactcttttctctctcttgggggtttcaaacttagacaggaataggggtgtcatttattgggccccagacaacctgaccaggtccctcagagcactgaggccgggaggaggagggtggaaggagatgggaagagtttcctttgtcctctctccctggccatccccaaacctccacacaaacctggggtggctgagcattcattatgctttgtctttgtaaataggcagctataaaaacctatcagcttgcagcaccttctccataacacaggctggatggatttataacccaggtcccctccccgagagaagctggcaaagcagaccccagcccgcgctggctgccatcaccctccctgcccctgccccacctcatgcaagaaacagaagggaaagcacattgagttgtaatatgttttcgatggaatttgtcacaataagaaactggattttgttggggctcatgggatgtttaggaaagagccagagagtggtgcaagctgtgggccgtgcctagaagcctgggctacaggagggcaggggctggagtgttggcagggtcgcacagtggctcatctggacagtccacagcggatccagcccacactgtgtcaggcactttgctgggactgggggatgtggctgtgggtacgattgacaaggtctgtgtcctgaggagcccgcagagcagatgagatggacatgtggtcagtgatggtaccgtgtcgggtggaagagacaataggctgagctgcccagagcatcgcctgaccagcttgggtggtggcacgtccaggagggcttcctggaagaagtgaatttattcaacacatgttcactagagccagtgatgcttaggcactgagagtgttgccagggatacaggagagaatgggagagtccctgagtcattccagactgtggggctgaagtgtcagccgatggaggtgtgggaagggcacagcggcttcccacgtgagcaaggagctatgcaatgtggcaggtggcagggccaggcggaggtgcctccacctgtctccagaccccaccccctacccaggtatggaattgttgtctccagttggcagagaaggaaactgaaatgggggtttcacctctcaggaatgggtaggccaggattttaacccaggcctgcagacaccaaatctatccctcgctcaggcctgcactgacctccgtgcacctctggggctccaggcagctgcctgggtgggtgctgtgtctggggtctctcctggcgttccttaggcccctcccctatcaccgtccttcattattcacttggatgccttgatggtcggggctggaaccccccgagctgacccaccatgcggctcatcttccttctccttccagtgcttggtgatcttgagagtgaggctgaaccgttgcttgatttttctgtgacccagatgaagagctgggtaaccatttgctcaataaagtgagagaccccatgttctggttaaagtggaggcactgaggaccagcgaggggaaggcagtacttgtatttgtcagcctggaggagacgccagataccagccagagcaccccagcctgtatctcgaccaccacctgcagttggtgctgaaccccccactccaccccatagatgagacaattgaagcccagagaggccaggcttcttgccgagggctgcacagccggcagggatgctggaattgggatttggccccagccttgtctgactccaaagccaatgctatttccaccatacccagtgtctcccagagctaattttgcggctggaactgcaacccgcaaagctatctaggacaggcaactcgatgaaagagaattaggagggaatcctagaaaaatggggctcggcagctcccggggaagcctggagaggaggtggcgccgaagcctctgccagcagattggggtggggctgttttcagtcctctctggcgaggtgttttgaagcctcctctgggaaccgtgtgcctctgtccaggactggctgtctctctggaaatcataccctggcagcatttggctttgggtgaaaggagaagagaagattctggccattcagagcaggcccttgtgcgggatggaacccattttccagaactcttgggacagggaccagggtggcaggcaggggcccgtggactgcctgggggacctggtgcttggggacttagagatttgttttcctgctgaatatattgctttctcgtgcctgctttgtgcaaccacgtgaggatgtgggggtgaggatggccgacaggacacgggagtccctcccgacaggggccaggcggcggcgggggtccgcatgtctcacgtcagcatggctctgtgttttcactcctctccagcacatatttagtggaaatgaactcattttattattaaaaattaaagtcatgcattcatagggtaaacaagattgagagcatgtggaggtgcactgtgaaagtgcagttctctcggaatgggcacttagagacgcgcctgttctctgcagctgccgcaggggtctcatcttgttgggacagaacacggttgattcatgcaattggctgttgatcaacatcaggttgtgtctagttttgtttttttcccgtttcgcacggtgctgcgaattcacagctgtgccagtgtatctgaaggtaaatcccacgagtgggccttggagagtcagaggatggggccttctacgtggacttggtgtggttgggtgtgtgatgcctgcatggggctatgtgtttttagcccttccttctgacaggttctggaggcctcctctgtgcctgccagccatgcagccgctgagccgagcatcacccaaggcttgcctgaacctggcctgggtcccaaaggaacactgctctggggcatggaggttggctggttgagaactaaagccacatcagcaggggcactgcccccacctgctggggtcagcccccgcccggagttcagcaggacctccgtgagccttcgtgcaggtggctcattgcagcacgtccccttggggtggtggccattggcttgtggttcctttgctcactgsggggaggaggacagccaggcacaggtgaaaggggcttgcgggtgacgattctagtccttggcccggggaatgtccctgggcttctgaggcctcacctccctgggtagtcaggagggttacgagggtggggcctggccctggggactccagggtgtggcagcrgtgggagtgaggaaacagccctgagacggagggagagaagggcgatccagatggcggtggcctcctcacccctcggccagtgatgcatggtagtggttttgacgggctgacctcgagggtctgcctgggagccgcttggaactctctggaggtggggccggccctggtgggggcaggaaggtcccagagcagcttgttaagtgggctgaggacaagtgtcaggagacctgggtctggatcccgctccaatacccctctccgtgtgacctccaagggatccacctgccttggcctctcaaagtgctgggattacaggtgtgagccactgtgcccagcctgtgcccagtgtacccatcagtaaagcagggatcaaacagttyttaaatcctgcagcggtggtgagagccacctgaggaaacgatgcaaagggctttgacggagtctggcacagagaacgcacccaataaatgactgccgtgacgatctttcttctcgccctcaggtggtctctggaagctcctctgtgcggggttttctcatttgccagctgtgcatcccccggtcgtagtgcggctcccacgggggtgtaccaggagcctctgctcctcctatgcttcctgaaaaagggcccagagaatatttccatcaggaataastgagtgaatcccagaaacttcctatcacatttagggtgattaggcagatgcatacgattctcactgtgggaaaggagctggcgacctcgatgggttgtggttcccgcagggatgtgcttgcgctgctgttactccagccgtagctgaggcacgggagaaaacggagaccccragaagttcagaggcttgtgcaggtcacgctgttcctacgaggtagaccctgactttgaccccaggctgtgtccctgccaagcttggagcctctttctcaaaagggcgacggaaggatgttgttacagatgtggttgccagtttcctccttttcattaaatcaccagggaaatggtctcttgcaacccccctaaagcagggggaaggaggaggacaaaggtcaggtcaccatctttgctggcatgtgagtggggtgggggtgggggtggggagctaggagacctggcgctgggcccttgaaatatccacatttccacaacattctgggtgtcagtgagcccctgccttcctccctcacatttatccggagctcttcctccgcagggaagaacaacagcccgagatggggttatttcaaggggatttccatggaaacgggagggtgggaggttcctcccagcacttgtataatgggagttggctgaggtggcagcgtgtccccacggaagggtgcgagggaccttctctgcaccgcaggcctcctcagagtgggaggcaccgacccragagtggctggctcccctttcatgctcccaccctctctacccagctcaagaccccggggctccttggtgwgagtgagagccaggccagctccccagggacccccaaggcctggtccttcccatggtctcttttctctagcaggtctttgtcttgggctgctgccagccacagcttcctggcaggacctcctggcaggacctctgtgctttgagccgctgttgctctgccaagaccttgccccgcaccgtggtctgaatcagcccagcaccccttcgcctctgttgcagtgctcacatttatccctcactcctccatccagcatgttttgttttttttttttttacaagcagacactttgctttataaaagaattctgctgtgagctgccgtatcctctctgagcctcccttttgtcatctgctgaatggtaacagcagcgcctgccatgcctgcttggtgaggattccatcaagcagggagacagtgggccgttggcggggagtctgagcaggtgtaccagtatttccagtcagctgatggctgatggacatgttcttggaggcagggaactcggaggcctgcagacgtgccccaggatgacaagattcatcagttcctacaagccctgcctgggcctcatgcttttcagtgtgtcctgggctttcccgtgtgaaatcttacctgatttttatgccaccttgagaagagtgatattcatctccgttgtacagatgaggaaactgaggctcagggaggcaacgtgatctttgcaaggatccgtctgttccccccgtggcctggctgcccctcctggcagtgcaggtggagttaaaaccatacaggagttaaaatgagcctcgatgggggtgggaagctacgactggaaaacgtccgatgctctcccaagtcaaattgtgcttggtgtctgtgggtgtgtcggtgtgggggagggaagctcagcccttttgaaaagtggggggtggtttgacgacgctgcaggggcagctccgagttctagagtctcagaacgtggttctaggcggttcatgtggatcaagtgctgttctgagcactttaatatccagcgtgaccataaggataagtgccactgttactggctttttcacagatgaggaaactgaggcacagagggattaggtaaagtgactggagtcactcagccaggatgtgaatcacagcccacacccatgtgcaccaggaagccttggctttcagggtccttggagggtgtgccgggcagtcgcctaagctgggaaaccttgggcttgtctccaggccatgtggccatgtgagataggagtcctcctgtgttatgttctgcgacactgtgggcagagggctgaggaccccagccctcccttagaacatcatgttggtgtgagacatttagagccaggcctccctgcttagaaagcacctcttgggtcrcttgcattagtgaagttatacatttgaaactccatttatttatttatttatttagagacagggtctctccttgtcacccagactagagtaccgtggtgccatcatagctcactgcagcctcaaactcctagactcaagtgatccccctgccggggcctcccagagtgctggcattacaggcatgggccacagcacctggctgaaactcccttttcatgaaaagaaacagcttcaactttgcaatctcatctgtctgtctatgaggctgtgcctttgtgtgagatgagagcagtcactgtcacttgctctttgaatatttgattaacaggtaaacagcctgaaatccatttgacatcttatccttttgcaaacttggctaaattctcttaaattggttccagttggattaattaaatgcatggttgcttatacatgtgtgtggaaatgattctggcaggtcatgtcttagctagatagtgaacataagcgtctagaatattctcagctgttgcagagactgccaggaatgaccttgaaaaagtttgggagagggtttttttttttgtttttattttgcttttgttgagacagggtctcactctgtcacctaggctggagtgcagtgatgtgatctcagctcactgtaacctctgcctcccaggctcaagcggtcctcctgcctcagcctcccgagtagctgggactacaggcaggcaccaacatacccggctaatttttgtattttttttttgtagagttggggtctcaccatgttgcccagactgatctggaacccctaggctgaagggatccacctgccttggcctctcaaagtgctgggattataggcgtgagccactgtgcccaggctggagaggtttttggatgcactgggccatggatgtgaaggygaacacatggaaacgatccctgccacctgcttgtgtgtccagtggacatgtctctgatctatccagattgttacactgtcaaagtgaaaactgctgagagtagagccatctgcctggccaggcatcgcttggaagcgtgaagacactttgcctttttgtctcatgattctctctccatgtgcagcttcgttggcttaaaagaaattaagaaactgggcccccgcttaggacctgctgaagtgcagagttactgtctttgaagtggtggggtagggaaaaataggaaataaggggtctgatcattttgagaaacctcagggagatttacacctgggctgtgcgaggaccccggagagtggcagagtgtatttggaatttccagtagtcctcattcctcccttaatatccaggggatctggggcctcagtcttcttatctgttaaatgggacaagtaacgactaggctttggggttgtcaggaagactgaataagaaaatgggtatgaaaacagtggtcacggtgcctggccctccatccctgtctccaccaggcctacctgtctggcccaggcctccctgatctccgcgggagcagacctcctgtaatggtgtcaaaggacccttgttctatttatccatctgatttccattttcggggccactgcctctagccatgttaggcacatggtgagtgtctgtcccatcaatccttgtcgattctgtggtcctgggtgggccatagcgtttctaacctgtccactctctcctaatcaggcatttggacctgtttgggttcccaaactctgtcacgggcagagggctgcaggaggctactcacgggccagggttgtttggacctggttgggtttccaagctctctcgcagtcagggggctgcaagaggctacacatgggccagggttgggctgctgggctgctgggctgctgctgtgttggagctgcctagcacttgcttcgttgctgcacctgagaggctgtgtgggctgagacagccagaaaagatgcaccgggagccatctgtttgcagcccttggaccagatgctctgcaaggactccgggggggcggtggggtggggagggaatacatttgctgagcacccagcatctttcagagcctcagcacagccctacaagctgggcattgccatcatgtttatacggaccaggaacacgaggctcagagtgactgagtcactggtgacagtcacccagccaggaagtggcataggtggggcttgaacccagggcttcctgagtcccaggctagtgttctttgcctcaggctgctgaggttccagctgaatgttgcggcagagtgacttctgagaagtaccacggaagggggtgactcacgccggggtggtctggcttctctgcccagtgcctgaggacacccaggtccctctgcggccttggggctttacccagcgtctgcatggcatcccgcagcaccctgcctctggagcgcaccctrtgtgtatcctaaagtgcgctttgcctagaaaacctttctaatgaaactggtggaagatggagaagccaaattcagttttcagagatgacactaatcctattaaggttgatggggccagagcatgtgtggaattagtcctgccaggcggcggccgggcwcctgcctggaaggctggaggggatcctaacaagagtggtgccgaggagagagagggaaggggcctcatctctcccagaggtttaaaaaaactgaggccactgtagagcttggttctcccaggttcctggggtggaaaacagggcttcccacagcagacggaaatgggaggtgggcagtagtcaccgagcagggaggctgtgaagtagtcatttaggtcgggaaagtcacgcaagatctccaagcttcagtctccttagctgtgatggggggaatgggtgccccccttgggcgacttgtgggacccagaactcatcacgcagagcgtcccactgctgtgcagccactagctgctcggtgctggggctgtggtatgagcatggactctggagtcagaattcctgccttcaaagccccactcctcaccttgctagctgtgtggcctggggtgagttgcgtaacctctccatgcctcagttccttcatctatgaaatggggagactgaaactgtaccccacaccctaggggtgttggaacttaagtgagttaattcatataaaacacggagtgagtgcctggtacgcaggaagtgctcagttcctcttggtgcctgtgattattcccataatcatcactggtgtcaccttgtcgcctctcccagcccttggggccatgctatttgtggtaggaaatggggcctgaaaccatcaaactaaactggactgaatgatcagtccaccgaccaccacagtcamggcttggtggccccacggactgaagcacgtggccaagggcagttttcccttctctgtgtgggttccactgggtccaagtacattgttcctaagcccaggcctctggccactcacccacctcctgctgagagcgggcagagctgatgcccctctctgggcagaatcagcccacggctgggaggggaggccaggcctgctgctgggggtgcagatagtggggagctgcaggccagccactggaaacctggcctgtgtgctgagacagcacattggacacagtctggtggccttcccatagatcaggccacagagtcctcatcctgggtccacccaaggcactggccatttccagatcaaagagcaggtggattccagggtgagacggtcctctctgctggctgccttcccccacccacggacaccgtttggctttgatggggctgtgtcctaggcttgacccaggtggtcaggagccttccactatgcagtgggatatgctgcaggagtagggcggagaaggaagggaatggccggtggtgaacagctgccatgccccaggcatttaattttgaccgcagtgctggggggccatacccagtaatacagatgaaggactgagactcaagggtcagtgcttgctcagagacccacagtgaagagtggggccatcgtgttgcatgtgtgtggctgggccccatcccctcctttctacagcaccacccctctattccttatcaagttcacctttaaggctcctttgcccctcactggggcagtcatgaggggagcagaggcctcggatctgggcatggatgagggtagagccctggctgtgtcctgcaggtgacacgtacagagcagaaggtgatgctggaaccatccgccagggaagggctgtccaggaagaggtcacagcctgaacagaggcgaggtggagagagagtgctcgtgtgtggggactggtggcagctcaggagggcaagactgtgacttgcaggctgggaaccagggaggctgcaggtgatggaggccccatgggtctcatggggcgggctgaggagcgtggctcctcccctgcagctggaggggccaggaagggctttaagccatggagtgagggaccagagttgggtttacaagggtcactgtggtgtcggtgtggaggggcttgaagggaggagtttggagggaggggctgtagcaatgttgagattccctaatcactttagtgttttcatgcatgagggccccgaggtgcttttttccagagcctgcactgaggttccctgttggcggcttccctcaggctgctggaacccccttttcctgtgcacctgcagagctggaggttactggaaactcatgtcctctgccagagtcagccctcacccagtcactgacaggtgcagtggtataaataccccagctccctccctcctgatcaggacactttgagatgggacctacactgtccccagagctcccatgggactgagctcaagtcgcactccttgagatttttcctgttatcacaccccacttggcctccttcatgtcctggccccacttccctacacccttcctggctttcccagcaacacttcctaatcacttccagaaaaatgttggcctcagggtctgcttctggagaacccagcctagcagagggcagcaaaggtgttgaggcactaggagaaacatggtgagatacagactcaggcggcgtccatcagctatgccaggaggctctgagacgtgccagtcagggagggaggtgctgaggccacagcaaactgggggccagaagtaagcaccacagacagcaccaaggctgccagggtccatcatcttgggtctcccaattggttgggtccagagaccagcctgctggggtttacagagccagcatgttacatctctctgtgtccccactgctgaaagcctctggtcagtgccatggtgctgagggagcttgggcctcccttagaggttgctaagagccccccacacctgccctgtgagttgttggccccaggggactctgagtttccctgtttctggttttcctgctcatgggattgggagtctgacctgagcttgctgagacagataactgatcattcagatacaaaactctaaaggttagaactcttttctgataacttaaatagaaaatgaattcatgcaacatgtactcatctgtccatctgcgcacgcatccaacatgtatgtatctcagttgattgctgattccatgccaggccttggggatctagagatggcttggtccctatggtcatacccatgtgaagggagatagaggtggacagaaagacaaccataatgtcattttgacaaattctgggaaaagatgggccacccagcctgtgagaccygtatgtagtgatggagggatggggaacggtggaggtgtcagggaagctccccaggggagctgttccttgaggtggttttaagagcttagcaagagttttctacgcagtgaagtgaagacgtagggcaggtggagtggagggttggcacctaaaggtcctgaaaaggaatggtgttgcaagaggcagcaaatagcatggggtgggctaagctccagctggttgagtttgggtcagaagtgtggacttggttggtaaggactcctgagagtgtcatgtccaggcacttggacttgatgctgaaaatacagccattcaacagagaagtatgtatgtctgagtgtgatgtggttagatctttagtttaggaagacctctctgttcatggtggggagagtggatgagatgggggtggactggaggcagaagagcagaggagaagagcagactttctaggagacgaagcgggaggggctgctcccagggcctggctgtgagtggtactgaccagagccatccatcagcccagatcatgtctccctaatttagaagaaaatgagaggaaagagccttttcatctctgcctcttctgggatggaaatgagctattttgaatcacgctaaagttagatttctagttttccttttaatccgtgtctcatttagagcattagaaactggaaaagcacccccgtatgaatgtagtgtcataaatcagtgcacgtcacaaactgcagaaggagtcatttctacaagagtgtgcagccttgcatttatgataaatctaatgctttatctttttgggcttcagactagagtaattagtcatttctgctgatactggcaaaccattgcatgtgcagtgttaatggagagcaaatgtatttgaactgcttttgcaattgcttgtgagcattgctgtgtatctcttctacctgtttctagaggggaaacatcctatatatttcattcttgcctattctaggaataggtgtggtaatagtatcaggtaacacttactgggtttcttccacatctctggcactgttcagagattcaataagaaaggatcctttgtccaaatggaagctgccgtgtgtgtgttgaggtccttgggtcaatctgatcatgctctgtctcctgctctgtgcccgcactgtgtcagggamcacctggataccactcatgtattattcacctaataggtttctttaaatgttggccctctaccataaatggaaaaccagcaaatcaggccaaaaatagaagtaaccaaagacaagcrcaggtgtttctgctctaatgaaatagagacatcctgagaaacttctcattctgcaaaatcccaaacaaatgacatcagagctgatggacagaatggggttgggacagatgactggaagtctatgcagtgtgtcaccagacacccataaaaatattaagttttagaaaaatctggcacaatgaaagaaaaacatattaattcctgttaaagaaacattccaaccattatacaatcttatcttgaaggaaaaagtgaaggtcatttaatggaaggggctgaaagggagggagctgaattatggctgggacatggcctgggtacagagggagacccgtccaccaaactcttccaaactgagctaagaggtaggtgcgcagggaatgagtctattctcttgggccacattcctttgaggcttgatgttcagccattagtgtattttgcattcagttgcttcctctggctggcacaaaacattaacacactgagaaaggctgcgtttgaaccaacctaacttttacattatactgacatcattcccctatgtacaaattgcatacgacctactttgcaaaggcaatggtcatagtaactgtacgatggtgagtggggttgttaaatgcagaccagatactgctgtaatagggctgtgactcaggactatcattccagttgcctgatatgaaaaaggacatgaaggagaaggttttatgagaactctggcaaagacccatgaaaccactcttctttgccctccagaaaacctggtaaaactgaaagtaagccagcagccccacgggtttgggattgatccagaagactgaaggaataaaaacaagctaatatatttctatcccctcccttctaaggcctgtagttggttccattatgatgagacagcagccgatgcacgtaaaaacagaggccatgcatctacacaggggtgttgaggattgaatgagattaggtctgaaagaacacacagtggagacagtgttgtcattgtggggacaaagatttcttttcacaatttgagtgacacttgtcatttctataggcagttaagagacaataactgcatactgttggccgctgtacctttcctgtgcactgagtccctgagcatattcgtgagtctttaaaagtacattctagtcaatgtagaaaacagatagtaagggacatgactctacctagattaagctcagttttgaagcagggcctagaggatttagaagtgacagagtcctggattaggtgacatttgataagagctctatccctaacttcctcttaattctggacaagccactccccgctctggctgtagttcccccrtctttaaaatgaaacagttgaatcagacaactacaaaaggacttgccaggccttctgtctcagatcctgtgttgttgaagggatgtctgaggccagagatgcagtttacttctgagcaattacagttgtatttcttgtgttcagcctagccctttaccaagctttgttgaagaaatggagcaagatccttgtcctttgcttcggtggtttttaaaacttggatgcctaaagaaaccaggaaggtcatatcagtgagcaaagtacaaaatgtrtaagcaagacacagtgcaccatgacgctgagagtggcaaagtaacagtccaaccatgcatcagggagtggtggggactgtggcgtgctggcaagcatagccttgtgggattctgcattggacagctcttacaatttctggagagaaatcagaaattcaggtctacatgttgaatcttttaatattgaaatgttcacttggcaatgtgtaaacatcatttgggtcaaagcccatstgtgaaccaagttagtcaaagacaacttgggcatttggacctcagctttatagtctatataagggttggtaaactatggcccacatgctaatctgacccacctcctgtttttgtgaataaagtttaaatgaagatgcagtcacacctatgtgtttaggtattgcctgtggctactttcacactacaacagcagrgttgagtagttgtgacggtagttgagacagtgtggccctgtatttattctctggacctttatggaaaaaggttgctgacccttggttcatgtcaaygactcatatggagcagcaggaaacattctgaatttggagctgaatgaccagggtttgacgcctggctcagggaactctagtaacagagtagagagtgtttctcttttctccttttggaaatgatcctgaagcaacaaatggaacaaatggaaatgcaaatgccatctttgatggaaccatagcttctggaacctcatatgtggggaagtgcagtaaaggtcaaaaatgggtgcaggatgtctccaaagggaaataaaatgcccatggctgtaaagctcagacagagcaaacaaagcagaattttctacaccttctgtggtgggctcagatggcaagacctatagttcctctcatggagcaataagaacaagtgcattggctggtgtcttagtctgttcatgctgctatagcagaataccatagattgggtggcttgtaagcagcatacttttatctctcacagttctggaggctgggaagtctgatacccaggtgtaacagatttggtgtctgctgaggacctgttttcttgttcatagatggtgccttcttgctgtgtgcttgcgtggcagaaggggctagggagctctctgagatctcttttataagggtactaatcccattcatgagcactccaccctctaagacctaatcagttctgaaagacgttacttcctaagaccatcacattgggggctaagatttctatatatgaatttcggggggacacacattcagaccataacaactggtgtgggagccttcccagatctagttttgcacaaagtgaaatcagggaagtctggggtgaacaaggtctcacatggacaagctatattttcaaaaagcagtctactagagaggcaaagtggagaaaaggggctgtgttatgtgccagcctgtggcatctgatcttaacaagaaagaagtaaaggccaaaagaactgactctcactcacaagcctgttttctaagaactagattactcttttggacactctggtgcacgaatcttgtataaatagatggttcaggaagaactcatcacattcagagatgagtaataattagtaaggaccagtgcaagctctatctcaagatcctccaaaaatgaagaaagtaacagatgaaaaatatgcgcaagaaaacatttgccataaatcagatgaaaatgtcaacwgtacataatgccttggactaaggaaaaaaataattgagcaatcacacctctaaacaagagtataaagttgagatacaagaactcaggagaggtggtaacatgacagaagagagtgaaacctgatatgatgagctccacaaagtagatagattaacaaataaacccatctaaaaagtgaagtatgcaatggaatgattatgacagggaacacagaaaacacagtaagagatatggaagatgagattgggaaaagcaagataaattaatgtaaagagagagagagaaatattagaacatgatacagaggacagataaggggatccaacatacacataattggtgtccctggagataagaatgaaaataattaaataaaaaaaatttaaggcacaattccagaactttctaaaaataagatttgaatttatggactgaaaggaagtacagtgagtggctgagaaaatattgatatggtgaggtcaacagaaagacatagagaagtactaatttcctcataaatcaagaacccccaaaaaaattcaatagaagaatggataaaggatgtgatgaggagatggtttacataaaaggaaatagaaatatcttttaaacacataaaaactcaacctcactcataataagaaaactccaagttaagatactgttttttatctatcgtataggcaaggactaaaatagctgatattaccatgatggtgcaggtatgagggaaacaagaactctcagaaacatggctatggatttcacttctaatccttgtctgatggaagtacacaagtaagaggccaggtgtggtggctcatgcctgtaatcccagcactttgggaggccgagattggcagatcacttgaggtgaggagtttgacaccagactggccaacatcacgaaaccccatctctactaaaactacaaaaattagccaggcgtggtggtgcatgcctgtaattttaggtacttgggaggctgaggcacgagaatcgcttgaacccaggaggtggaagttgcagtgagccgagatcacgccactgcactctagcctgggtgacagtgtgagactctgtctcaaaaaaaaaaaaaaaaaaaagaaaagaaaaaagaaatacgcaggtgagaaatgacatttatccacatttgtcatagcattgttggtaatgggaaagaatggaaatatctgtaatggccatcacaggggactgtttacataaattattccagagcgtgatagtggatagcaatgaaaagaaygtgacagctcagggtgcgctgatgtagaatgatgtttaagattctttaggtgaaatgagcaaggtgcaaaatagtggatgatccatgacatgctttatgattaaaacatggtatcttatgactgcttgtgtgtagactccttctggtaggatgatgcacctgaaagtgctcatagtggttgccactagacaggagagctgagtgagtgggagaagggcctaagggagacttattttcactgttagcttttttgtgccctttgcattttatactcatttcttaaccaaaggctgcacagcttaggttgtgaccataagctctagagtcagctgttcgagttcgaaccctgactgggctgcctactcgctgtgtgaccttggacaagttacttcacctctgtgggtctcagagttgtcagatggatgtaacaatggtgcctatttcataagttgttgaggatgaactgagtcaattcaagggaaagaatgaggacagaacctggcacaaaaaaatacagtcaaattagctattatagtgactgcatgtrtagttgaacccagggtctggatttggaacccgtatgcttattggcccaatgggggggatgacttggccacagaacagccacagccaggcagtaaagggcacagggagggggccttagcctggggcttcagggaagctgcccaggggaagtgatgctgctgggtcttacagaatgatgggaaaacttggcggcaccgtttcaggcgacgctacttagatctgcaaaactgttgatgtcttacaataccaagtgtagggcggggctggagaaatggaaactcatgscaccactggaaatggatatgaaagcaaaccatttgcaaagtcatttgccaatatccagatatgtccaagcagcccctctgttccccttctaggtaaatagcagggaagccttcagctgtgcacagagagccattcagcaacagagcagaccctcgaacaacacggggttgggggagccaaccccctgcacagtcaaaaacccacatacaacttttgamtccccaaaaacttaactaatagcctcctcttgattggacttccaaaaacatgaacagttgataaacatacattttgtatgttatatgtattatatactgtattctaataaagtaagctagaggaaagaaaacatcattaagaaaatcataaggaagaggaaatatattttctgttcattaagtggaaggggatcactataatctttatcctcgttgtcttcatgttgagtaggctgaggagaaggaagaggatgggttggtcttgcagtctcaggggtagcagaggcgaaagaaaatcatgtataagtgaccctcacagctcagctcatgtttgagggtcaactgtrttctaaaatccaagaggctctgaaagcctaaagattttttcctaacttatttggcagtgaaacccaacctaaattgatgtgaaaccatttatagcccttctctatccctgtagtgtgaagtttcatatgttatgtacagaaatagaaatgcgtatgcgtgttgtcccagaagcccttgggggtgacagatgtcctaggtgacctgtgcaccatattactgtacagtccaaatcctctatcctgaaatactgggcccaccctttgggatttgggagatgacagtgaagctggtgtgtgttcagggaattccaggttgttgaaggtgctggagtagaggggagagggggaaacgaggcagcaggcgctgggtcccgacggtccttggacacctactgaggatgtgggtacaacacttctttcatccctggggctcagagatgtctgctgaatcagtcgaggggccttcagtccactgtgagccccagaaggcagagctgtggcctcctccgacttgtttctcagaaaggtcacttgggcagcaggtgaacatggctcaggagaggcaagggagggtggggacaggtaggaagcagaagccacttactgggcaaagaccatagccatraggatggggagggactgagtagccagagaggcgctcatcaaagcctactgctgtcgtctgaaggtctggtttctcccaaattcgtatattgaaattaagccttaagatgatgtgttaagaggtggggcctttgggaggtggtcaggtcatgaagatggagccctcatttatgggatcagtggctttataaagggaccccacagtgagaagatggccatctatgaactatgaagaggccctccccagacactgaagcttctacacctcgatcttggacttcccagcctctagaactgtgagatgtaaatggctgttgttataagccccccgagtctgtagtattctgtgggagcagccccaaatgactaagtccacggcccatcctccacccactgaggccataccactgggaagggtatcagaggcagggttggggtcttagaggtccagggtctcttgtccaggctccccagaggcaggccccgaggtgtggactagagtataagtggtttatcaaggaagtgtacccaggggaggtccagatacaagtaggaggggctcaagcacagaggagccagggaagggggggctctggaccgaaaccatgtcccctccacggctttggacttagccccttggggacacagacgtggctggggatgggtcacaaagtaaccagggtgactgccagcctgaactctgggctctccagacttctggggaccgtagtctcagcctgagcagctttctccaaggagggtcctggaaacctggggcctgcccctgattttgtcctgggagcagggcccctccatggtgttctggagcccctcatattagcttttgaggttgattgcttaattttcagtttggagagccagcagacatcttgttggtagtttgaaattggccagggcaggggtatttataccatggaagctggcaggggctgccttccagaacctctctccctccaggtgcagggaaacacggacctgcacaccctggtggctttcacaccttcccctcctcaggcggctcgtccccttgctcagttatactgatccttgggcttgcaggcagaaccatctctgtcatccagaatctccctagtaaccccaaccccaaaagtgggctgccggaagaggcagatggcagtgtcccagggctatggaagccactgataaacatcttccaacaaacaggatcagggatctgcaaagttttttttttttgttgttgttgtttttttgagacagagtcttgctctgtygcccaggctggagtgcagtggtgcgatcttggctcactgcaacctccgcctcctgggttcaagtgattctcctgcctcagcctcacaagtagctgggattacaggtgcctaccaccacaactggctaatttttgtgtttttagtggaggcggtgtttcaccatgttggccaggctggtctggaactcctgacctcatgtgatccacccgccttggccccccaaagtgctaggattacaggtgtgagccaccgtgcccggctggatctgcaaagctgttgaaaggaggagtggataggattacaaagttggcctgattctgctaaatgaacatttcaacatgtttcccctcgtgcaccgaggaggcatgcactctcctctgagggtctgaggctttcttcacggagactttgtaaaccacttctccccmgcactctggagtgggggagtcacgtagggaagtcatttctctcctcttggacctctcagtcccctttggcttctcgctgataccaggcagtcaggtggatcagagaagacatggactctggagctggatgtctggtgcaggcagtgtggcttcaggcaacttgctttgcctctctgggcctcagcttcctcctggaaaatcatgatgctcatacctagggtttcatgggggtcaggcaggacagtgcaggtgcaggtatgagcaccatcccatcaaggacatagtcctggctgctttcagtgatcttggtgctggggaaaatggggctgattctcatggaagaggaaatggattcatgtgcccacttcttaaatggaaattcaaggccttgatcgtggcccacttatgaggtggggactagtgaggcttcaggtggtgtcctaagattagaaaactggagcattcagttgggagtcagacctctgctgatgtgctgtgtgacgttgggcaaggtgtgtgacttctctgggccttgtgttcagtagaagcaggtcatctttcaatagacctccttcccagaccctctcggatgctgtgggcatccagctggcccccatgccacacctggcttctcggggactggcctgcattctcacacccgttctttctggcaacgatgggcatttgtttctcccctgccagcaaactcctttggaccaagaattgatgccatggtgttagcatacaataaagcttcaaggagctggtgaaacactctgagacsgtyataaaattggcttttcatccctgtcggagctttcttattacagacaacaagcagtgtcagggagcagcacggtagatgctgcttaacccagcagcaggcgagactgagggggtctcgtgctgtttgtcaccaccgcctctctgagatcatccccaacccatactgttgacattcactgggatacctggctacctgttttgggtttccttacaattttttcatttgtttaatagtttttatttttcaaagtcttaaaaaacacaagtcagtgaaagttttggtctttgttactgtcttcctacyaggtacgagggcctgaaagtcactgttarttgattattgattatctgattagaaccgtacatttactttttaaggaaatgtgaaaaataagcctagaaatgaaatcaaaagtgcggtgttgaagttagaaatggcagcgtcacggtcaggaattaaagctgctgcttctctgtcacatggtataccacagggggtggtagctacagcccatgggcaaaacttggcccagtgcctgtctttgtaaataaagtttgattggaacagagtcatgcccatgtatctacacattgtctgtggatgcctttctgctataatggcagagktgcagagttgccaaagaggacatatgtcccacgaagcctaaaatattggctatctggccctttgcagaaagaatttgctgacccttggtatagaggaaagttagtggcacaagtttagatcgcctatagtgaaagaccttgcaggaccaggagtcaggcagacctgggttcgaaacccrctctgccacttcctggttgtgacttcaagctgcttgccttttcctctcagggttctgtttctgtctctgtcaaatgcagccaaatactgcccagtttgcacagctgtttttggagacagagacactcagcaaggggtccagcccctggtgggtggtatcccaatgtcactgttggcatttgcagtgtcagtgatgtctggcttattcatcaggccctcttgagtttgccccaaacgagtcaaccctccagggctgtgaaacttctgctgccttgatacgatgtgatttccgaaccagaaaaatggaggaggccctggcccctaatgcttaagtcacrggtgactctgtgcaattggtttcttccctgtctcctgtccctctaaaaagaaccacctgagctcccggactgtgctatatccaggcctaaaggctggtggaccaggacacagtcaccagcaatcagctttcatcgacttggctggaccttggaaacttaaggcttgccctgccctggcttcttgcggtgagcaggtcttrtggagttgctctaaccactgtccatccaggccggggttagaggatccaaacacagccatgttgaygggaacctggaggcaaatagagggcatgagaccctcctctcctgaaacctttctggccttcttattggatacccaccaaacagtcttgatcttaaaactttgtgcaaagcaataggatgaacttgtaggacatgcataaagaggaaggtatggattgtgacatgmggctcttagggatgctcctcctacagtgctgagtgaccctcctcagaggcacaggtgtgggcacagcttgttctttcaaatcctggcaccccagctgttctgctgtctagctcgttccctcattgacaaaacaggaataacagtgcccacctccttgggctgttaggggatcaactgagatgctaagtcatccaggagggggagcctctttcccagagtcctgcctgtgcccggtggctgtgcagacctgatacccgcagccatctacctctacacctcatgtgtgttagagaacaccactctgatttcagcctctcagactgggggttcagtcactggctgctaaaagcttcctaaagccaaggcctctccttgcctccaggggctccgtgtctgttagatgtgtaaacagatccatcaccgagcatactgatgagtcctggcctagggacaagcatggccacaartgaggtgtctggaaagggctcacaggggaaggagccactgaggagggcaagaagaaggcttggccaggaagatggggtagggctcattcctggcaggtccagcctatgtgaagcccagagacccagtgaggggcttgcccaycctttggccttgctggagccaagggtgtgaaatgggagctgagagtaggatgttagtagcagtggcttcctgggaagggcccccacrtgggagcctctggcctggttgcaaatggcaggaccaaggaggtsgttgttgagttagttggaaggcactgtcctgccaggatttcccacgtcctcgtttgagcattgagatgctgaacgttaaactgtccttcattctccagctcagttcttttattcatccaacaaacacagagtagctactgtgtacyagatactattctaggcactgggcatacagtggggcccccagctcgtcctggcctcccagcccagtgggtgtggagcagtgagcaggaggacctcgagtgtcacacttgctccccttggtacacattggcacatggcgttgccaggtcagatattctcttcttggggttcaccagcatcccccttggatgtgccctccgtggtatgtggccgcttccatctcagtctcaggccgatggaagatattttcaaaattaacttagcttttggaattggttcctccccatgttggtgctcaaagactccccagtgagacagctgcctccttgagctctgtgtgcaaaacttggggagcaagacttgcttgagccagtgtttggcctggcccaagctgttgggcctgcagagcctcacctgcccctgtggctcagggcttggtgtctgaagtggatggaggcagctgaactggtttctccagggccccatccagcctgcgtttcccaggctgctgtcccagctctgctccacccaagtctactctgccgtcccctgatactgacactgagtgtgtttctgaacactgcagggggtgaggaataaggtgggcatattgtagcttcaggaggtgatgcttgtgtctgaaatayaaggaccacaattgccatgcaggtgtaaatatctccagtgattacacatttccctgcaccgaccgagtggctgcacccagtctggggctctgtctctcctggtcagtctgttcttcctgaagccaggaacacaggagggcaagtttctctccatccctagtcccaccctggagccagcacacagtaggctgcaggaagtgctcgtggaacaaacacaggcagcaatggaagaatccccaccactgggattttcagcagctgatcgtagaagggagctggactgcaaggccgtctccgacygcctccctctcactgcccagctgsctagggtgatgagtatggacgaggatggaggcaggctgtggctgctgtctcatccaagtagccttttcctgacaccccaaggctgggcagagrgactgagttggtcccagggcggagcctgctgggaaggaaggctgttagccgctgccttgcaggtgccatagcaatgccaggcagcccacctgctccttggattagatgggggatcagagccrtgagggaagcaggcctgtacccaggaacaggctcatcccgcccctgccctggcccggtactgatggacctggagccatagagtgcctctccccgcaacacacatgcacatgcatgcacgtgtgcatgcacacacatacaccacatacacaccacacacacacaccccacacatacacacataacacacacaccacacacacacacacacacacacagccaagcatcgattctgggccctgttctgtatgcacaccaattttcctgaacagactctccttgtcttctagcacccgggaggattcagaagtgtcctggctgccctgtggtgatggggatggcagggacctgcatttttgtgagttcctgcacgtgatgaaggggaaattgcaactgcccaggcagcctgtgcaaaaaggcagtgggtttcaagtgtggtcataaaccaaaagcctcaggttcacacgtcatgggggaggctgaggggaacacacagcctctgagctgtgctctcgggctgattctgagctcgtgctggtggggacacccccagacttccagcagcactggatgtccctggatcctcacatgactcatgaggaggggctggcatgttcctgaacttcaggtgttgactctgcagtgaggcgatttggatcagagagactgtgcaggtgcccaggacacayagcaggtgaggtgcacagccaggcttggctagcaattgggctcttaatgatgctcacactggacgtgtcagagtgcctgctcctgggcgtgcacagccttgtgggaggggccgacaggtggayagggaattatagggtggggggacagggagctgtgctggctgttgtggggacaccacagggaaggccccctgactctcatgttccagcattgccacttcctgtcatcctctcggcaaccctatatgaatgggaataggagtaagtgctctgtaaagactcctctggctgccaggcacgtgctaagctctttgcccacaccactcaggcattcttcatgatggccctaaaagtagagactcttgtgtccccattttacagagtaggaaagtgaaccctaaagaggctgcctgctgttctgyggccacrcagctgggcagtggcggcatygggatttgaacccagaaactctggctgtacggtcttagccttggctcactctcacctccaagaaatagactctgagcagtgaggtgacgtgtcccaggtctcatgggggctgagggatctgggaagggtgatttgcccccacccctgcatctcccacacggtcccatccctgaacccttgcacacacggcccctctgcctccatgcccttcccctcacyttgtcaaaccccagcagctgttcagcaggcacaccacagccgcctctggaggaggcattggctggtctcctgtgtcaatgtatygacactgcctggcgaggtctggctctccggcctccctgtgtatccacaggtctccccagctctgcaatccctttagggcaggctcaggtcagtcatgctatggtcacccctcagtgccccgacatggctcagcagtgtccggtggcttgaatggaggaccacaaastgtcctctctctgcagaggggccccaggtcatatctgctgacttagcaccgcctataagatttaaagaccactctgttttcacctggaggaaccgtcagctcacgcaggatggcaggtggttttccagggctccacagtgaggtctccagttcatcttttgatgagggtgatgatgggacagtggccctgaaagcacatggctctagagtgcttaggagcctggtgacctgctgctgtgacttcctctccagagctggagctccaggggctgaggttccccttccctgggcagccccttcctcctaatccrgctttccctgtgaggaagagcctcctggccttaagccacatccttagcagcttctgccgtggcccttcctccagccggggaccctggcagaatgcatgggcaggaggaggtgccttggccccaggacagccaggtrggcagtgaatggacgaaatcagtctgtgcaggagggaaacactaacactaaccctaaccctaaccctaaccctaacacaytctcaaaacatttgattctaacttaaaacacacaagggcactcctttccatggccctactacatgatctggcctgacctgcctttctggcctctgctcataccactacctccctgatctttcagttcctcaaacacaccaagctggttcctaccctctagctccctcccactgactcctcctcaccctgagaycctcctcagcttatcaaaaaaagattcccccattttctcayttcaaccctttgttcatttcctccaaagtactgtattacagttaatgattattttttgggtctgtttacctgtttgggcttcgcctccccagtggtatgtaagatctttaagggcagggtgcatgtgtgtttcttgctttccaaaatatccctagtgggggccgggtgtggtggctaatgcctataatcccagcactttgggaggctgaggtgggtggatcacttgaggtcaggggttcgagaccagcctggccaatgtggtgaaacctcgtctctactaaaaacacaaaaattagctgggcgtggtggtgtgcacctgtagtcccagctacttgggaggctgaggcaggagaactgcttgaatccgggaggcagaggttgcagtgagccgagattgcaccactgcactccagcctgggtgacagagtgagactgtcttgaaacaaacaaacaaaaaactaaaacaagaaaacccccaaaatatctccagtgggtagcacagagcctgacacacagtaggtctgcatgaatatttgttgaaggaatgaaacagtgcctggatgagtgtattgcagccccttccaggtagggcacagccatcggggagccagcgtgacagatgtgagtgctgtggccctgggatgcgatgacaaccccttctcactggggtgtaccctggattgggktggtgcatgtagaatatatggcatgctgctggcacttggcaggtgctctgtcaaggttagttgttgttacttaaaaactctaatcaagtaagcatgacatatactgaggtcctactgtgttactgttatgggctgaattgtgtctgctccaaaactcacatgttgaagtcctaacccccagcacctcagaatgtgactgtgttttgagacagggttttcacagaggtacctaaggttaaactggatcattaaggtgggccctgatccaatatgactgtgtccttataagaagaggagattaggacagagacacacacagaaggacaactgtgtgaagacacagggagaagacagccatctgcaagccaggagagaggcctcagaagaaaccawcctgctgacaccttgatcttggacttccagctccagaactgtgaggaaatagatttcttttgtttaagtggcacagtctggggcactttgttatggtggcactagaaatgaatacagttaccaaatttaattyttcaagctctctctagcagcaaagtatttcccccatataaaaaaatgaggacgctgaggctcagagaggtgaactcrtttgccggagycacagggcttgctggcgggcgttggcactgatagttgaaccctggtccactagtgtgcctccagagatggtgcaggccacgccgtctgccttggtctcacgcaagtggcggctaagcccagaggcacttgtctccatttcagtgccctgctattggctggttagaaagtcaatattttatggagcctcatcaacytcccaagtcttgggtctcaattcccccttttggtgtgagcctctgaagactggttgagcatttgtgagaaacaaagttttgactactcaagactctagttaaaaaaaaaaaaaaattgcaccaatgtgccatccggctgcagcgtctcaggggcatgattcggtttttgcaacagggagtagctcttcttgaaacattatgggatttctttcctaagttgacttcacttacattctgctcagcacatgcaaagcatttggttatcgggaggcagagtaagatgacaaccctattattgaaggtaagcagacctggcctgttcacaaagccctttttacatcttgtttcattctgttaccaacagggtaactgtgaagtgggtgggcaggaactgtgacttcttttcaagtctcagaagatgtcagtcccccagggaggctggcctccgagtgccagtgcaggtggctccccctcggccgtcctatgccacgtgccctctcctcgtcattctcagccccctcgcgtctggagtcacctcgctggtttatcgtcttgtggtccatctgcccgtgagcattccagccaggtctgtgggcttcgttttcacggccgccattttggctgcccgcagagtgcctggtgcaaagcrgatgacactcagtatctagagcggcacttccgggtaatccacaaacayttatcaaacacttaggtgtcacttggggtgctcggaattgcaaacatgaggacaaaccctcactccatttggggcctgcagattcagcaagagtggaaaaaccagctttttaaaatggcagcctgggaatcccagaaktaggaagcacaagcttgtctttggcaggccaggccagctgctgacccgcacggccttcaggggccagccagtgcgaccatgattgaatgcacagccctgactcctttgtggcattggctcctgggtccaggtgggagcatctgattggcccccactggtcatgtgctaaccaggaagtggtgtgtgatgggctgagcctagggctcatacctgcatgtgttttgggggaaacagagagaaaggtgtggcctctccacttctgtggacaccccaaataggaagaagggtgcacacaaagcaccgcttcctccacgaagccctcctcrggcacatcgaggagaaccagctgcccaagctcttggctgctgcccttctgaggcctgcctggtaggtggcgtaggaggaggcttggtaagcagatgatgggacatcatctaccacatcccatcagtaacatccaacaagtgtgtgtgccagcacagacctgggcactggcatgtcccagccgtcattccatgtcaaatacttatctgtgccgtcatcgtcgaggtctggtttccaactctatggctccattgtctcakgtttaaccagtcctcttaytgggcatcagcttttccatttttgctctgtgagaggttgttgagttagttggaggaccaagcccataatttcctggatgacagttcgtgtcccgcagatagagcttaaccaacagtggttccctttccagacctaagcaggtgggagtcagagatgagcatagagaaagggtgaaggggtgcctctggattcccaaggcagggacatagctgggggagctgcctccggactcgcaaggcgggggtgtggcagacactttgcagaaaaagtacatctgtccttggggcgagaggccgcacatgcagccccaagtccctggacctgtgagatcctggctgcctgctgttgatagaacgggacaggtggggggatgcttttgattcatgtacggtgaatgatcttattctcacctttatcactggtggcacattctgatrgaaggagacattggcagtgggactgggcaagaaacaggtcatttgtcatggctgtgtgccagcctcctgtcgttgcacagcctgtccttgggaagtcttgctcacctgtcatgtggagtagttgtatgtgtgtgagtgtgtgtgtgactgagagagacatacacatatgcacacacacgcagaagtgtctgtacctctgagaatatagttctccagaggatgcagaaaaattggggattgcagactgtcgtgcgtttaaatgtgtccttctctcaagaataatgtccacttggaacctcaraatgtgaccttatttggaaatagggttcttgtgtatgtcactagttaagwtgaggtcatattggattcgagtgggcctcaagtccaatggctggtgtccttctaaggagaggacacacagagacacagggagaggaaggccgtgtgatgacagaggcagagattggggtgatttatctacacaccagaagccaggagggagtcagggagcggctcctccctcagagcttccagagggagccaggcctgcccacgctgtgatgtcacattcctggcctccagaactaggagaggataaagttcgattgttttcyagctgtctgtgtgtagtaatatgttacagcagccacaggacactgatacccagacacatcccaggccctaacatcccagaagaggagtccctgatactcctcttttgcaaaatgaggtgtgggctcagagcaagttcgattttctgtgaagggcctgatagtagatattttagactttgcaggctgtgtaaatctctgttgcatatttttcttttcttttctcttcttttcttttcttttctttctttttttagacagagtctcactctgtcgcctaggagtgcagtggcagtggcaccatctcagctcactgcaaccactgcctcccgggttcaagcgattctcctgccttagcctcccgagtagctgggattacaggcacatgccaccacgcttgcctaatttttgtgtgtgtgtgtttttagtagagatggggtttcaccacgttggccaggctggtctcgaactccctacctcaggtgatccgcctgcctcagcctcccaaagtgctaggatctgttgcacatttttctttgtttgttttgttgtcatttgtttgttgtttgtttcacaaccctttgaaaatgcagaaaacattcttagctcttgggctgggtgtcactgagtttgccctaggggaaccctcaccgcatgcgaagctgagtgggcacggtttcctccgctgtcaacgggaatattgatggtttccctgagtgaggacccaggggaagcactgggctggtgcccgcctcctgtctctgtgcccaggcctactgtctgcttcacactttactccccagaaccaggcatgrcacttagtacagggcaggccgagctcgggggagatttgcttgaagaatgaggaacgtttctggaagcctctctgaccacccagcaggcaggggcaggtcttcctctgagacccaagtcctctatgcttccctccatcctagcagtgacttccatgacacaccattgtccctttgggagcacaggactctggctgagtcatctctgaagtgaggtgaacccagcacagggactgatggcttgggaagagcagctcagcctatgtggggggtgttgagggtgcccaggcccaggggcgatttgatcccaccctaccctagcgcagccagaatgctggggccgaggttcacctgggagatgcaggagtttagagaagaggaggaggatgtttaagcgtgcgagctggtgataggagcgtggagttggagctagacccagacttgaattctggctttgctgcgtggcagcagctgtgtggcccttgatgagtgtcttaaccttgctgggctttggcttcctctccaggagggcatagcaagtcctgcctgttagggccatcctgaggatggggtgaccagagcatgagcagccgggtgcccagggcacctgggcaacagccctgtgggtaggtggstctgaatggttgagccccacgttttagtcaagaccactctccttgcagagcagttcatgtccacttgcccacatccttcctgtcccagcaccgtctgtaggttgctatgatcaccccattttacagatgaggaagcacatgcccaaagaagcaagtgacttcccaaggcggcaaggcaaggtgaggggcagaatgaggaccccaacccagttctccccaccccctccttcccttccagagcccctgcctgctggaggcattgtcccagcggcagagggtcaggccacatctgccagagctaaggggagtctccgtcatctcaaatcattgggtcaaatgacagaaatctgctggcatgctgccttttgaggctcggcgacttctctgargctttcctgatggctgctctgggtgtctggaatgagctgtggacgagggccgtcctctgagtgaccatgccccccacgcagccgaggttcccctctgcctggctcagtgcgggttctgagaaagcctgcctgccctcactggaggcacctctgactcactgctgcaaggatgtggccatggactggggtccccgggggcccccgaaagcctcagcaggagaacatgtttatccagaagcctgggcaacacccagagggtcctggcatgggtgtgccaggcagactgggcatggaaacatgccccgtgatgtctttgggatcctgggagcctgaggcttgttctcagtgtgtagggcaggggctgggtgccacccaaggggggcaaactgaggtcacagagagggaggcagtacccccagaaaaggtgattcttctcattggaagattcccaaggcccaaggcctgggtcagcagacagtggaacaagggtaatggtcatgtccttaattcacgtaaccccgaggtgggtccctgtgaaaatcccgtggatggggcctggtgatggctacacttatattctcagaagcagcattaccacctggacccttcccttttctcttactccctcctcctcgtggggtctgcaagggggtctggtaaatggcatccccctccccgcccaggggctggacccgtggagcataagccaaaaggggcggcaaagagagacacggaacctcactgccactgcccagctgccggtgctgcaggacctggcttaggttcaggggcccggtgggcttccccagtgctggaccccagcaggcaggtgtggagggagcagggggtagtggagcagagtacagtggcccctggctgttctcccccaggaagagaggagaggcggggctggactctttcccatctccctccccaatactccagcgtcagtcagtctccccccgacagggggaagggagarwggccaggagccttcccctggggcacacacagrgagcccagcaggcttggaagaagtgtctccctcctcctccagccctgccagatggtcccagccctcctgcagggttcccgaagtggaaggatctggactcagagcccagtgctgctgcttggcatctgtggtcccgggctggagggcgtgttggcagctcatgcctggccagcgcatcggggtggctgcagcagaggatgggggaggggagcagggacaagaggagcctgcaggctgctgggtgcagccagggcttctgcttcaccccgggggtcacagctgctttctgttgggaaagctcccactggaggtatggggtaggcagtgctggagaccctggtggcaagtgctgagctggggcacaggtgaggatcaggaggagctgggagggacatccgcaggttgtgctgatggactgcctctgagtattttcacgggatggtggaaagaggctttgagtcagacctgggttcgaatcctggctcctactcttggtagcagtgtgactttatgtgacctttctgaacctcagttttctctgttgtaaaatggggaaaaccacacatcgtgggggcrgttgtgtgcacctaaggaagccaccccagggctgggcacacgggtagccgattgtcatatccttgttatggaaggttgttatccttgttaggctggtgggcaggggtggtagaggagtaggttgtttttggaaaatggtggacttagtcttagacatgttgtgtttaaattgctcatgagaaatccaaatagaaagacccagggtgacagcagggactgctaggaacttgggataaaaaattggtcctggggtgctggtcactgatcctgtggataaaggagttggggtgctctgtttgggtccagctggcagagttggaccagttgagagaaacttctaggaggaaggtttagaagaagaatgctttcaccatcagagctatcttaatagctgtgtaatgtggtagtgagctccccatcgtaggaggtatgtgagtcatggctggaggactacttggaggtctgttgtagaaggattcagacaccagagagggttagactggatgaccttcagttcccctcctgggtgaccacagctcttcaaagcccctcactrctgcccgcttctgcaggattcagggttgaatgtcagaagtctgctggaatgctgtcgattgaggcacggtgacttggccaagcctttcctggtggctgctctggtatctggaatgagctatgggtgagggccgtcctctgagtgaccgtgcccccctcacagctgaggttcccctcggcctggatcagcgtgggttctgagaaagcctgcttgccctgactggaggcacctggaggtggttttcaaagtgtcactgtcaccgtgacccagacatgcttgagccccaggctgggaaagctttttttctttgctttaaaaaagcagaaacagtgaagcaagcataaatttgcctttgaaataagaggctgaatgtctgccaaatgcaaatggattgaaayggccggtggtctgaccttgggatgttccattggtagtttcagaggggctctgagcccccaggccggctgtaacagtggacaygctggcgctggccagtttgatccctttgaaagccccccgatattcacctccaagagagaaggccctggcaggtcctccagcatgyggacgaggcgcatgcactgtgaggcagcggctctgtgggaggacggggccttttgtccactgtcctggcattccatggccctgtgtccccagatatccgcacctgttcctgacaccatcccttcctgtcgtgtgagcgagatgctcttctgtggamcctgggttcctatggtcactgggagggtgaccctgagttcacagagaaaggggagcaggctgttcaggaaaactaagcacatgtggtgagcatccacaggcggctagggatggaaggcttttcatccgggctttcagatgaggcccctgaagctcagaggggttaggcaattggcctgaggttgcacagccaggaaggagtgatggcgtagtgattcccattgggctctcccaccccctgttcctccctccatccagcccagggcctcgtggatacattaggagcccaacaagagttcccctcccttctcccttgcttctctgagcctcggtttccccatccatataccaggaggaaccccctgcccatctcrtagggctctttgacatggtgaaatgagatccagatactggctgtctgtgtcaactgtaaagtgctgtcctgagtgaccagttgttgttggtgcctgtagccatccttgaggctaaaagagactgctgcttgcctgatgctcctcccgccagcctcctgctttctgcgtgacttccctcgccccagcaatgaaccctggagccacctgcaaatgggaaagctcttttgttagtttccacagaatgcycaccgtgcacatgatcagagagtttgcgagcctagctcaggtcagtggaactggttcttttcgtacatgtaggaagtaatgcagggtgctgccgaataaatccactgcctgcctggcctctgatgaacttaccagctcacgccagttctagctccagccagttctagctccagccaggaggaggaaaaaggcatactaggccgtattttgtttctttcaatgtttatttacctgtacacacacacacacacacacacacacacacacacacacacacatacacaggcaaaacttatgttactgtcccatgcataattctctagatttgggccacatagatctggttttggccattgactggcaacatggcagtagccaactgcagagccaccagggagcagcctcattctgattgagtataacgaagacgctgatgggaaagagagacacgggtgagcaggggctgtggggcatcatgagagttgggagggtccccatcgtggagctggccagccctgagtgskagccccggcacagtcctctgctagctgtggcctttggccagtctccacttctcagagtctcagtgaccccagctgccaccaccaggattgttggggtgtccaagaatgaaaataggggtcatccctggccctcaggggatatgtgggctttcccctcatcatgaatggaacaggtgcgtgctgtggtgcaggctgagaggcggcagggtgttctctcccagcagggtcaggtcttgctctgataactgcaccaggacaaacatccccagcctctgggatgcacacccaccagcatctgcccggcaggtttaattactggctgagatgggttgtgttgggctcactaagtgtgctccataagtgatgaaattgggcaagttctcacctctggaggctctgaccccgagtagctttgaccctgagtagctgaaggaacaggcagttcagcctctgcttatgggctgtgtgtgcacacatgcacgagtatgagagtgtgtcagtgtgtatcgtgtgaatatgtgtgcaggtaagtgtccatgcatatgtgtaagtacatgacaatgtgtgtgcgagtacatgactgtgtgtttgtatgtacaactgtgtgtgcacatgtatgtccgagcacattggcgtgtgtgtgaatgtgagtgtgagagcgtgtgatttcatgactgtacatgttcactctgtttattctcgggggaaatagcaggcaatctgtaagaaaatgactgtgtaagtttcatgggtggaggcttatgatactgttagagtctatcttagtctgttggtgctgccataacaaagataccatagactgggtgattcataaacaacagaaacatttctaacagttctagagctgggaagtccaagatgaaggtgccagcagtttcggtgtctgttgaaggccctatgcctggttcacaggtggcgacttcctgttgtgtcctcacatgggggaaggggcaagggagcttttgtaggcccttcttctaagggcactaatcccattcatgggggctmcaccctcatgacctcatgacctcccaaaggccccacctcctaacaccattatcttggggttagggttycaacatatgaatttgaggggacacagccattccatctgtgaccgtcctcaatcagccttctccctgcagggctgcaaatgagggtgctgccggattcataagagaagatacattgtaacatccacagcacacaggcactaggttgggagccttttccagcactcagatcagggttcaaaccctaactgtgcccttcaggagctgtgtgacttgggcattccttcattttttattcaagsacacagctgrcatctacatgcctgctgtgtgtcagggagatagaaatagaggggtgagcccctgtgatattaggcaggcagctttcccttccagggtctcatttttctcactggtgaaatgagggcaggggctcctcccctggggttactttgaggggtcagtaaggtgaacagttacagtctcttgcacagcccctgaacgttgtttagaagtcaatactctgttccatcccatcagcttcctcttcccttgttttgactggcaaatagtcatcaccttctgaagtcattaagagaaggtctttttaaactattatgatgccatcaaaactgacttttgatccaaaatatcttttaaacaagctgaccattcagtgaggatttgccaggctcctttgtgatccatccttttggggccagggtctgtggggcccagagctggacatcatggaactagctctgaggagctcatgttcaggtgggacacagtctcctggaatcacagttctaagcactttccaactattaactcatttaatcgttaattactaccatttcccagatgatgcaccagggatgttaagtaaccaaggaatatggcagggccactgggatagtgggctgttagaaaagtcagggtggaggccgggygcggtggctcatgcctataatcccagcactttgggaggccgaggtgggcggatcacgaggtcaggagattgagaccatcctggctaacacagtgaaaccccgtctctactaaaaatacaaaaaattagccaggtgtggtggcgggcrcctgtagtcccagctactcaggaggctgaggcaggagaatggcgtgagcccaggaggcggagcttgcagtgagctgagattgcgccactgcactccagcctgggccatagagcaagactccctctcaaaaaaaaaaaaaaaagaaatgaaaagtcagggtggagtacagacacaaattagagaacttaagaggcaccaacaagagtatgggcagtatagggagaaatggaattagcacggagcaggggcttcctagggaggaatgatgggaggagacacctccttcctgctgctcctgctgtgtgccagcctgggctgggagcgtcacgccatcagctccagtattcattccagccctgtgaggctggcagcagggtcctcctagtggggctgaaaggtgcaatggtgaggaggaggattgcaggggctggagtcctggccccaccacttcctggctgtgtgactgtgggcacgttactcaccctctctggccctccatttattcatcattaaaatgggattaggggccaggtactggtggctcacacctgtaatccaagcactttgggaggctgaggtgggtagatcacttgagctcaggagttcaagaccagcctgggcaacatggtgaaactccatctctacaaaaaatrcamaaattagccaggtgtggtggcatgcgcctgtagtcccagctacttggtggggctgaggtgggaggattgcttgaacctgggagggttgaagctgcagtgagcagagatygcaccaccgcacttcatcctgggtgacagagtgagactctgtctaataaataaataaataaataaataaataaataaataaataaaacagggggaatagtagtccctactccatagggctgttgtgaagatctagtgagatcaatgttcatgaaggactttggcgctgcacacgtttctgagaaagggtgacctggccaggctcactggggtggtaagtggcagggatgggcttctccacgtctcccctgtgatattaggcaggtgtatgcagttgcttcacgtccarccacaccccctcacacacmtgcagaycagccagcatggcacaccagacacatttctgctgcacctttccccayacagtacctaccacctggcgtgcctctctgcccatccccatctttttgatattttaccttccacctaaatccgaactgaaatcccagacctcactagctggtgggtgcatggggtctctgctctgccacttctggagctgctcctagtgcatgccccagttactcactcgtggccaccaccccccgagtcaggggtcgagagtcccctttgtccatgatgggtgacgagggcatacccggaacagagggctaattaaatcacacgctgaggtttgtagaacatgggacgcttcattaggctctgtgtgaacaagygcgcccagcctgctcccastactccagcagactcgagcctggtataatcacagctcacactctgcttcatcagctcgctgaggctgtggggagggctcacacctttgggctctaaagagagtgggcctgaggtgtgggatcctgcttctgagcaggggtgtctgccccgagccagcttgcccagtggtgtggagctggagccccctctgcttaagtaaaggcctctgagggacacatgtcatgcagatgatgacaccagactggctcctcactktaaactctacttcctgagagcagaaggcagggaaggcctcagttggaggtgaaaatggaactttcatccaccagatgttagataaaagataggaagggtgttccaggcagargggaaagtctgggcaaaggcttggaggataaaagggcaccgcatgtttggggagcggggcatgttccctggggccagagacctgagttctcctcttggctctatccccagctccacccatgacttggggtgagtcctgaaccccgaccaaccttagtgtctccagggctgggatatgggggggtggcagcctctgatctgtggtcacagggagtctcagctgtggtgctcctgtgcctccctcttgctactctctggccagtgacgatggcactttactctcctgcagagacctgtccccagtgcctgcctcctccagtcctcttcctcatgggctggctgctctgggcacatctcagggcagccccagaaggtgggctgagctgttatttggggcgtggggttctcggttcctccgctccatgctggtgggcctggtgcctggcaccactggcccgtcttccaggaagctcactgacaccatcctggatgggccttgttttctctctggcctgggagtcagctgcactctcgcaggtcctaggccaaggtgacctgcttgtttcattcttgtctttctcctttgctttatggtatatttttaagcataagatatatttatttgtaaaataaaagttcattataaaatgatgccttaattaccttcctgcaatataacaattatttggttgtatagttcctgttctccgtattttgtgtaataaaatggacccaatgggtgctgcacaatgctgggtgccacagggaacacacactgctgttttctcctggatttttaaaattttaattccagcatggtccttttatatgtgctttcactctagctgtttgcctacatctccacagttttgattgtccagggtggtgaataaaatgcaacacttggcatcttttaatgtttaaaaaaatcaacaagtattttatttaaaataaaatgtgaatatctgtaatcctaaaaaaaaaaaaaaaaaaagccacaggatccttgagaggccctctgagacagtgacacccctgaccagctgcagccccctgtccactccccaggctccattctctctacccactgcctctgcatcctccgcccttggagtttctcagggtgccccgcagatcacctgtggcccaagtgctcagggacttgtttaaaattcagattcccaggccccgcccaggcttgcaggcagccagggccaaggaatccaaatactaatcaagcccactgtaattgccctgcatctgaggtctgaaatcactcgcctgctctggattatctgtgctccagrgtggcctcagtttacaccatcctacctccccattgaaaccttactgctcacgatggcccaggttcccacccatcctgggagagaaagatgattggctcagttctctgggaggcctggtgattggctgcctctaggagggtgtggctacctcttgatccaatcagtggagggcagcatggggatgtgatcatgcagtgaagaacctgtaccgggggtagttaggcrccagggaaggggaggaggagaaaccagttctactgttagtatcagctcatctaacatttggcccctggtgggggtttttgcatccttttgggggtctaggtctcttctrccattttgttggcactttaatttcttgttaacaaacccaagagcacatacaacttaatttttaaattcccaataatttccagcatcctctaagttagtgctgagcgatagaaatgtaacggaagctgtacgtgtagttttaaaacttctgatagccaggttatgcacgtaaaaagaaacaggtgaaattaattgtaataatttgtatatccaaaatagtataaactgtaatcaatctaaagtaattgagacattttacattctgtttttcatattaaatctttaaaattcggtgtgtgttttatgcttaccatacatcccagctcagactagccacatttcaagggttcattagccacccatggctggtggtccctgtactggatagcgcagcactaaatgatggctttactttgtatccttggggaagtatgtatttttgaatccattttcctcacttttgaatagtttaagaacttcccagtccatttgtctaagggtatttgacttctaaatgttgggtttcttggccgggctcagtggcttacacctgtaatcccagcctttgggaggccgaggtatgcggatcacttgaggtcaggagtttgagaccagcctggccaacatggtgaaaccccgtctctactaaaaatacaaaaaaaataattagccgggtgtggtggcaggtgcctgttgtcccagctacttgggaggctgaagctggagaatcgcttgaacccggcaggcgaggttgcagtgagctgagatcgtgccaccgcactccagcctgggcagcagagtgagactccatctgaaaaacaaacaaacaaaaaraccagttgggtttctagcaataaatgctcataaaatctgctggagttttggaggattagtccattcatcctgacttgtgtcctgtttctgctgggtcattgttgacttcccccwcttgcctcacacttgtaaggccatgtggcacaccatcaacattcatctctgattaaggagcttgtttcttgtagtggctgccataacatattatcacacgtttggttgtttaaacagcagaaacttacactcttcctgttctacagtccagaagtccaaaatcatggtgtccrtaggcctacrttccctctgtagcctgcaggggtggatccttccttctctagaggctgccagcatctcttggctttatggccacattactctaagttctgcttcggtttttmcatcacctcctcctctttcccccatgtcttctcctctgtgtgtctcttataaagccacttgccactgcatttagggcttactcagataattcagaatgatcttctcatctcagaatccttaattatgtcttcaaagaccctttttccaaataaggtcacattcacaagttccagggattagagtgtggacataccttttgttttttattttattttatttaatgtatttatttatttttgagacagagtttttccctgtttccctggctggagtgcagtggtgcgatctcggctcactgcagcctccgcctcccaggttcaatggattctcctgcctcagcctcccgagtagctgagattacaggtgcgtgccaccatacccagctattttttttttggctttttctttagtagagacagggttttcatccaacagatgttagataaaatgttgcccaggctggtctcgaactcctgggctcaagcgatctacccgcattgggctcccaaagtgctgggattacaggcgtgagccctgcaccctgccaagagtgtgtacatatcttttgtggggcaccattcaacccattgcagtgaggtgtcagtgttttgacaggaagaagcagcaaagaagacaaatcagcactttatttttctaagctttgaaattcttaaaatgatagtgggttaagaaagaccaacttccccatggaaggtgctggtccacactggctgggtttagatccctttggctgaggtttagatccctttggaggggagtcaatttgaagaagaagcacatcagacacattcaggaaggcaaacccaaagacagcagaaaggcaagaatgtctcaaattgttcaaaaataaatacgttagttcttgtaacgtgctccgaatagggtgaggctcaacatgagcacttaataaatgctcagtttaaktgtggtaattgtaattctcattggtatatatttatgtcctgatcctatacctctgttattaatgagactgataataggtaagtgaagggaaaaagagacccccctgctgccaggaaacaaaacaaagtatcgagccaaatgccaaatccataagtcaccaagatgggttttgatgacaaaacctttctttctggactccccctgcccctccgcgaagccgttccccatggccacgcttgtccgtggctggctttataggcccatccttcttttatatgatcatcaagatggcactaatttgggtttgcaaatgaggttttcgtgaygttgtcatgtcagcatctggattcaagaggggctgcttcccagaccctgaccctcccctgtggcctgggagcaggcccagcccctccctccatctaatcactccccaggaacctgggggatttgctaatgggcccaggaagccataaagagtaatgaaagtgctgtgtgactgctctgcacggggttgcccttggggtcccttcctcataattaaattcggaatcctccttctgcctttgagctggaagagagggttttatcctccctgtggtctgttcatcccttcttccccccattcatttgttcagcacttattatccagttatttgtttatcaagccacagttgaatgcctgctgagagccggtttagggcactgagcttcctgttctcaacaggcagaggtgggagcagccaggctgctgtgggaagagcagagtggctatggagccgccctgagccagctctgctgtgcgggagttctgcgacctggggaacccgctcgcttggcttcctcatctgtaaaacggggagactaatataatagcagctaccttccaggggggctgtgagaattaaaggggacgatggatataaactcccacacactgtcgggcacagggcgttaatagcagccctcagtctcatgtcccacttattttgtgcccgacacacttctgagcatcttatgtctattcactcatttaatttgcccagtaactctaggaaggaggtcacgtccatggttcttattttgctgatgaggcagttgaggtaggcagaggtgcggtgccttgctcaagatggcacagtggaaggacacggggcagggcggacctgaccgcagttggccctcccttgcctgcctcttagcacgcatgcagccccctcgcctgctctgcccgttgtgtctcagaatctccactgccatttgcgggtgccctgaatccacctcgcttttccgtgcctccctgcttttgtgcttggtgcagacccctgcttcctcatgggcacctgcctccttagaaccccccttggaatctgttaactacagcttcctgggcccacacsagcatccctctgcaactcagaatttccagggcccataatttcctacaggcccctcgggtgattgctttctcagtaggcaacttagggccgtccctccaaacctttagagtgasaagcgtgctacctgggtgcttcataactgatgttgcaaatgttcaaccaagtgtaggaagtgaacacactttgtatctgcaaagtgctgtgcatacaagcgaggtcaggagcagctggcacccgtccccaagggtttccatgcctctggcgagatagggtaggagtatctgcaagtagctgccttcttggccatggaagaacaagttcaacagggcgcctctgtgtgcctgccccttgctgtgtacaaggaccttgcacttcagggacatcaaggcaccttcagccgggctttggggaacttgtgtatgggagggggggacctctaaggacctttcctgtcccaaggagctccccagaagcctgttgcagtgcccagcaccccagcctcatggttaaggtaggcagtccccaggagtccccttcctgggacatcaactctcctggtgggaacaaatgctgagcacstcagcatgagatgggtacagtcagggactccacaggcaggtcatgtcacagacaaggtcacacagctaggtggtggcaggttggagagagagggcagtcccctgactcccatcccagtgctcttttctcccatgacagtgacgggtgaaatggcacagtgtatccctgtcaggcaggaggggatttgttgtacttttttttttttttttctgaggcggagtttcactctgtcacccaggctggagtgcagcggcgcaatctctgcacactgcaacctccgcctcccaggttcaagcgattctcctgcctcagcctcctgagtagctgggattacaggcacccaccaccacgcccagctaacttttgtatttttagtagaggcggggtttcaccatgttggccaggctggtcttgaactcctgacctcaaatgatccccctgcctcgtcctcccaggttgtatttttaatcctccacaactaaatactcatgtcagtggaaaggttccaagctctttaaagacagcctctgccagcgtgctcccaggggaggccagggaaggctttgggaagcctccgtgggggtggggacctcctgcaacccctggcgcacagcctcaccccgctgtaaacagagctgggattgaagtgcgatttcggtttctttttctttttttctaatcaaataaaaacacctagggggcrggaagcgaggaggaagaggccagggagtaattcttgttgccaaaccagtttctaaggggctccgctccgctcccagcatttctgtctctgaggctccgacctctgagatgatcaatcctcccatttcagccagatgagaattgctgtgggccctgccttttcttaatattttgcatgagagcgacagcccggccagcggcagtaatctcccacccacgtggggaggcacccactgtcctgccatgtgcataattgaagtcttcagactgcttagtggttctaattagcccaaagtggccccttctggcctcagtggaaattackgccctcctgccgcctggtcttactagctgatctttgaaggtgtgagtgagccrggagacatgcagagcctagcactccctctgctgcattggtctttcttggcaggccttcrtggctttgcagagggcgggcagttgaggcctctgtctgccgttgaggtcctgcctccctcctctctgccaccactctccatgggacaggtgctccagctgggcgcatgcatgcccctctcacctgaatgcytcccactagcagtgtctctgctctttctgacccttcaggttatgcagtgcctcctcctccaggaagtcatccctgatccccaggctgggccctcagaatcccyaygtctccctccatcgcagccctggccatgccatgtggtgcttgtttacatccatgactgccccatgagactgggagcccctagggggcagaagccgctccatgtcccacctactcctggcctagcgyggtcccataggacatgtctayggaaatggagggcgtgagggtgggaggaaggaaggaaggcaagaaggaaagaaggaaggagaaggaaaaaggagaagagagaaaagagggagggtgggcaggtagcaccatgcccattttgyaggtgagaacactgaggagacataaccgggaagtggcagggccaagcacacccttggcagctcattatactttcccttcagcctagcaaagctactgttcgatttggggaaatggggccgcttgtatgaagagccgcaggcaaagtggaaagtgccgagggctggaagtcagatgggtgtgggtgcrcagccttcctgtgtacctgtgggcaccacttacctgctctgtgaccctgagcagggcacctttgccttcgaaacttgaagatcacagtcgtccaggtggattcaaggcgatgaacagcaacagcgcatgctcttcccaaacagtattcttcttatcctcactgaagccccagaaggtagttgatccttaccacatcattaacctcaatgcgcagatgaggatgccaaagcacagagaggttgagcaactggcccaaagtcacacagtgcgtgagtgacagagccaggatttgcgcctgggttcttggctctgatattagtgccattgactccactctgttgtgtgaggtatgaaggcatccagtacagtgtctggcatcggcaggtagcttccatggcagataccccccctctcccaccagattctgccctttgagcgacaggaagataaatagcgctgttctccartgtcacttgtgactttcctctgtgagttcattgtcagggtgctcctgagctgagctgtggccaccactcattggtgtggtccctggagacacttggataaaattgtgatgacagagggctctcaggctcatgagatcacacagaggagggtggagctcaaagggctatctcagaccgggatgctccagaggttaggtcttggtgctgtgtttggcccccagctgctctttcaggccttggtcttgcccttgcccttggtctctggaaggctgaatagctgcatcttgttcatctggaaactctctgggatgagtgactttagcatctcggatgttgccatcgtagcccatgtgcataacaacttattgtgcaagcatgtacagtcatattgaaaataaatgtagaagtgaaggaggcagtccaaagacggttcctgacaatactcggaaacagcttcattaggtattggccagagcttctatttgtgggttgctttggcgaaactgcttccttaccattaaccatatccaggagatggaggggaaagtcttcacctgggttggtttttctcagaggggcaggcaagctgaataacgggagtactaacatttccaagaagattaatgattaaaatgttgaatacaatttgagacttgttttcatgttcatattttatagtccagaagttctttctataatgtcctcataaatattttatttggccttaggttaaatgtcagtttccatgtcctgcyacgtgccacttgaccracgtgtgtgggaacgtctctactttggacacactgtctatatgaatggaggcccttctaccccttgaaatgttcctcaactcccagctcagtttcccttccgcatccctttgactgcatgagcggaagcgaggcattacagagaggtttgaggagccagccagcaagctagcaacggcttcagttcatttctgagatgtttgcattcaggggtcccattggccaaccttaacttctcctttgagctctaggcatcttgtgatgaatggcataagccttagaacatgggagaggcttggatgggccaggagctccaaacactaaggaatgttgcttacatcaatagacgccttagttacttaggtcaatagataccttagttgcttagatcaatagatgccttagtagatcaaacrcccaaatcacccaatgtacttttagggcaatggttgccaaactttttggtcttaggacccctttttacactcttaaaaattattgtggctcccaaagaggttttgtgtatgtgggctatatccttcaatatttgccaactttgaaattaaaactcagacagttaaaaagatttatatgaattcattgaaaaataaaaagtgtaaacccattacatgttaacgtaaataatattttttttggaaaataactgtgttttgttttaaaaagtgagaagagtggcgtgtgtatcaatctctttaatctctrgcttaatagatgatggttggattctcacatcagctcctgcattcagtctgttgtgatacattgtttggttgaggtattgtcraacatctatcctcaaacagatatgtagttggaaaagggagaaccccacaatcccctgaaaacgtcttggggtcccctggaggtacttagaccacagtcttagaactgctgatttaggtgatgggtgaaactcaagatgaagacaaaagagaaaacatttcaaccccaagagacttcaatgcattcacatgcattgactcaggatcattaaagctctaactgaacccaacatggagacagagcaggaaacacagccatggctggcttgacttcagcctcccatcaaagacccccatctttggctcaactgcccccagtggtttcaatcagccacagacttcccttgtccagctggactggacgttctgcatttgactgtctgtcggctgcccactgattttcaggctgctgaattacccattagctcacctgaacccctaatgccacatctaaacggtcctcactctgcctttctcagcatccgagaatgtcctataaaaggcttcttccatggaggtgggcagccttgggcctctcctagggtcagctcaggctgcccacgctggctatggcttcctgctggcccctggaagctgtgtacacctgggagagtgaggtgaatgttaatttattcagcatgcaattaatgaattctaccctgtgcctggcacgactcatttctcatgccaaagctagggtggatcagaccaccttggacaaatctggatgggtgaacttgtggattgatcaatgatcttagttgatgaaaaatgcaccaaatgactgtttcctttaatgcgattgcttgggtggtggactcgattacgttgaggggattaaattagcagcttgctgggtttcagatgagtgcaggtggctgctggcacttcctctcccctcttttctttctttcccttttactgcaaacgaagacttttcaaagctttactaagtacaataaatgccatccccttaaagtgtagacttccatattcttagaattggcaagctatgtatatgtttgtgaaatcacccccataattaagatttggagcatggccttcacccrcaaaacgtttcctgttctctgtgtggtccattcctatctctgccctgcaccctgggtagcyagtgatttgcctttggtcactgtaggatagtctgcactttcaagaatttcatatgaatagagtcatagatgcatgcattttttggtctggcttctttcactcagtgtgggtattttgarcttccccctggttgctgtgtgtgtcaatgatttgttcctttttctttgaggagaattctgttctgtgaatatgccatgatttatttattccttcccctgctgatgaatatttgagttttttctaattctgagctactgtgcagaaagctgctatgaacacgtacgtatgcacmtttgtgagtttgtgagctttcgtgactcttggttacaaggatggttggttcgcatggtagacccgtgcttattttcacgctttaagaaactgccttgctgtttcccacggggctctatcgtttttcattcccccagcagtgtgtgagggrctgtttgctccacctcttcaccaactccatattattagtctttttaatgttcgccactctgatgggtgtacactggtatctcgttgtgatttgcatctgcgtcttktgatgactgatgatgttaagccccttgccatgtgcttcctgaccattcttgtattttggtttgggaagtgtctgcccaaatcttttgcctattttaaatcaggttgcttgtgtttatattattgagctgtaagaggtctttatacatccgggctacaagaggtttactagatacatgtactacgaatattttctctcattccatgccttgccattttcttttcataacagtttctttcacatagcaaaggtttaagctttgataaagttcagtttgtccattttttgttgtttttcatgctttttgtgtcttgagaaatcgaagttgcaaggagtttcttctataatgtctcctagaaggctcatggttttagcttttatgtttaggtagatgatgcatttcaatgtcagtttgtcagatggtgtaagagttgatattcattttgcccccagtcatttattggaaagactgtgctttcctcgtggaatcacctgagtgcctttgatgacaatctgagttcaccacagacttgtgggtctagttctggattctctgtttagttgtattgatccacatgtctgtccttttaccaggaccacactgtctgtatcactgtatctttatatcagctggggtaaatcctccaactgtgttcctttatttatwtatttattgcaaagtcattttggctattctaggtcttgttctaacaggaacatattttcgcttatttaatccttaggaccctctgaagcaggtgtgaatattaagcccattttatggataaggaarctgaggttcggagaggatgagtaactttcccaggtaactgaggaggaagtgagccttgcccctggtaggtctggcagctgcacttgcccttagcctctaggcaggctgcactgccctctctgtgggttccaaccattcctggtacacacccctagccaagaacttgtgaggttcttggaacctcatgcaagaggctcttgcatgaggcctcttttccaacttctgtttatcctgtcccaaagaggtcagtgagggacccccagggccgcctctgttccctcaccctgcaccttggccgggagacccccgcagcgcagggagcatccctccggatgtttcttcccaggcaacaatattctgtttatcaagccaggccccgaggctgaggcctccccctggcctggggtgatttttggttggtggtgagaagcagcaggggtgcctgggggcctggctgtcatcggagccagctccctgtcctggtctctgctgtgcgggatggcatgggtaggggctttgtgcaggatgagggtcctgccgactgggacgtgggctttggaagggccacgcttctcttacaggggtgcccttgtggctgtatgaggagtccaagctctgaggttgaacactgggattgaaggattcctgccagggtgcacttaggtggctcacttggcccagagtgagccagagctggctcgcatcagtgcgcgggagtcaatagttacatttttaggaattttttgagccagttgttaaactgtgggtagcatggaaatcagccctggcttgagtaggctcgcatcagtgcgcgggagtcaatagttacatttttaggaatgttttgagccagttgttaaactgtgggtagcatggaaatcagccctggcttgagtattcatgccacggacttggcaaatgccgcaaatcagggccttctctctamcccctcccagccccaacccgaagacctgattgttaactgcactggcaaacccctggctctgcctcctggagcctcaggttccttatctggaagcggggagaataatgcccacaccttaaggcatcatcaacacccttaaatgagatcatgggtatgaaatgcttgtgaatagttttgagtgtgatacgcaagtgtgaggggtgctcaccaccctggccattgccattgtcctcctcatggcagcagctggacaatgtgcccaggctgggagttggtgtctccaggaaaaactggaggaaaggagcccgataacccatgggcagcagctgggttagggagggctccagacctgcctatctccgtcagccctgctgaatgtgcctctgtttgctcatctttataatgggtgcactgatcccagctgagaggggtgtggtgggctttggggtacaggccacaaggtacaaggcatggcctgactgcagctccgtcactctcatggctcaggtgcatggctgtcccacagtggaaggaccaggggctggcctgatctgcacttcatggcatcaagagcacaggccctggagtccaccaggcacagagaagcagcctgctcctgggtggagtacaagttcaaccctcgggagttgtggtttccccatgtggaagctggcagcatgccacgcacctgccagggctgccgcgagggttcgcacacactgtgtgtaatgctcctgtgtgagytccccggtgacccaggtcccactggggtggccggcgtgtaaccaggacaggaacatctccaaagccactccttgtttgctgcctggtggctcaagcagaacatctgtgcctgcagggggcccataagccttaatgccctgcagagagggggcctgggggaggctgggactcacaccagctggggarcaaggcctgcagctrgggggctaccaggatgctccttgccagtaaagagggtcctcaggagatcagccacagctcaatcaggagggtctgcccatttcacaggggaggaaagcgagcctctggaggctgagctgccagcagtcacggggccagcgcacagccagagctgaccactctgtatgactggcgggtctgcgcccttggcataccacagcagctctcacaccaacagaggctggacctgctgatcagcccccgctgtggggggtcccgcctctgcccacaccctaccccacaccttcacaggggtggactgtcaccctctagcagactgtcctccagagaccgagacacggagcctctccacaaggagggaggaaagggaggtggaaaccagccttaccctggacaccgggtggtccttgctgcatacccaaccctcattggtcagactggtctgggagggcctggacatgcccgcggggtccgtttctgaattcccgttgcctggcataagctctggcacttagtaggtcctcagttaatacttgtcagataaataaatggcctcctttggggaaatgaagaatgtccaggctggccacggggaaggggcagtgttaggagtggagagcgagagggtgagccaggcagatgggacctttattcaaagggcagtggggagccatggaaggttttagggagggccatcggatgaggttttcattttagaaaagtccttctggctgctgggtggatggggtcaagatgaagacaggaaatccagagaggaggcggctgcaggctcgcgggtgagaggtgaccatggccaggccagggcggaggcagggaggtgggcggaggggggctgctggctctgccaactgtgaccccagcacccagctcagggaattatggccagagacaaagcagcttagagcctgacccctgccctggagcagataggcctgggaagggggctgatggacacgctgatgtgatgggacctgagaggtgttcttgtcaccaggccagtttggcccccatcgcccgcctgccggctggggtctaaaaggctggctgtagccccagcagagaggacagggcctgtgggaccccaggtgctgggagcacagaagccagccaggccatctggcccggctgagactcaagtgataggtccgcatcagtgtcaggcctccatgccycccatcctgggatgggaacagcacatcacagtttgcagagccctgcggcaggggtgacycttattgccattttgcaaatgggaaaactgagacttagagtctctctgactcacataagcaggacaggagacagtcgaaccaggtcccccagctgcaatttaccacatctcaaacccttttcctctctctgtcattgattaatctttgcttcaatgtccacatagttctgtgatttgctttgggtacatagtagcaataattatagcaacaatttctagcagtttcttggtgccagacacttctgtctttgttgcctcgttgaatcttcaccatcaaccttgaatatgaaacccattttagagattaggaaactgaggctcagagactgtttataacttactgagaatcaggcagccccactgaggtgctttaccagtctcccctttaccagtggttctcaaaccttggcacaccacaggaaaacctgtcagaatgcagattctaggccccagcaattctggtcctgtccgtctgggcagagccttggcaagcttcgtctttaggagagaagcccaggtgactgggggtggggctttccggagcctgtgttgcaagaaggaaggcagggagcatgtgatcttctctcggtctccctcaccttgaccctgtcccaaggccagctgctggcctcaggctgcctggttgcctttgaaggtccatggggatccgatggagggttggtcgtgctgaagccaggctgggtgtcatcctggctctgagcacagtccagcctggctagagtcaaacccagcagcttgaccggatcctgctgaccacagacaaatccacaactaccccgtccacctcccccaggcccatctgcctctgtgccagccaggctggcagacactccatcgggcgggccccacctggcttggccagggagaaactggcagccacagcccctggcctccccratccctgtcccttgtgcactgcccatgggaggggcagtggccttccacgctgggtctggctcctgcagtagcagagctgggtgcagacacgggttggaggccggggccatgggggcattcgtaggctcatgagtcccttctcactctcttctggggactgggtttctgctggaagagaaagggaccagccttaaaagacatcgtgattaaaatggaattattatttcagcctggaaaaggaatgatgtactgatctgtgtcacaacatggatgaaccttgaaaacattctgcgaagtggaagaagccaggcagaccccaaaggccacgtgctgctgtatgattctatttatgcaaaatatccagagtaggcaaaatccatagaaacaggaagtagatcagtgatttccgggggctggggagaggaggggatagggaatggctgccgacggatgtggggtttctttttggggtggtgggaatgttctgagtttctttttggggcrgtgggaatgttctggcattagactgtggtgatggttctagaattctgtgaatctgttaaaatccaatcaagtgtacatttaaaagtggtgaatttcatgttatgtatattgtacctcaactttagaaatgctaaaatagaaacaacaaaatcatcatgatgcaacgcctttcctcatagacctggagcgaggcctgagagagaagccatataaggcagatgaggggtgggatggagagcttcctttcattcgctgcctgcccagtgagggtctgcttcctctggcacttacttaacaaacccgagagtcacccatgtgtgaggcatgggctgggcacagaagggtccacgcccacccstgaaagtgctcgtccatgctagaaagacagaaggatggggtggtcattgaacctaagtcagaccgtggcttcccagctcatgcagaataaaatsctcaggcctctcccggcctgctgggtgcaggaccccggcccrgcccacctctctgagctctgagctcatgtcctgccccatccctctcacacgcacactggcctccttgctggcctgcaacagatcaaactcaccctacctcagggcctttgctcgtgctggtcacctgatatctgtgaggctccctctctcacatccttcaggtctctgctcaaatgcgtctcccccaggaagtcttccctggcctccccagctaaaacagcccctcccacccctcccatgccatttaccatactatagttttcatcttagcccttatatctccctccaagagctatttattgacatgaaaatttgcttattggctgtctctcccattcgagagtgggctttctctggggagtgtgcactgctgaatttccagtgtatgcaacagtgctgaggagagggtaggtgctcagttaatgctttttaattaaattttctattgtggtagaatatacatgacatagaatttaccatctgaaccatttttaaatgtacaatcaatgtcattaagtatattcacgttgctgtgcacctgtcaccaccatccatttctgggactttctcatcatcccagacagagactctgtacctgttaaacaagaactcgccattcattaatattcttttgaatgactaattgaatgactaagtgtatttcctgtgtgtcggtcacaagctaggtgatgagccagtaaacctggcgcctcggagggtgtgtgttcccgtatctgtctcggagatggacagatcgactcagagaggtgtgaagggctttgcccaaggtcacacagctggtcagggtgggatkcaaacgcaggtctttccccctttccacacagtggcagttctgggggatcactgcatgcaaagggcatagccatggcacctccaggcctccagccccacccagggcttcccctgctgccgctcccccaagggtcactgtgtcggccacatgttcctggtgtcctcggctctggcaggctgaccaccagtcacaggcacgtcttgggaccacacttggaggtttcagcttcccatttcacctggtgctcttggggtggaggccgggatcatggaatcctttttccatggcctttaacacaaatcaatactgtgcccagtttaaatgtttatgtaactcatcatctgccggctctgctattacggtgtgcttttctttttataaaccaagctcaggggaggtgatattaagtccaggacttgcctggcgaggcccagcgcgtgtgcagaggattcaatgtggcaataagggcgagttccctgcacagcgcctgccatggctcgtcccagcctcctccctcatctgcttgtgtcctctacacggtagggaggagggagaggtccagagaggggaggtggcttgcccagggtcacagccacaatgaggtggaacagggattgtttccaaggtgtgtgtgggggtgggacccaggctcctgccagaggccagggcggcagagccctgacaggcagatcctgggttcctgggtrtccaggttacgtgggtgggcaggtggcagctggcacccaccccatacagacactctctgacaccccccaaaaatactcccaccagccccttcacattttcctccagccaagtgaccaaagcacagctcagggcccatttgccctggccacactgtcccyactctccccacccaacctctgaccacaggcctgggagctgccccatctccaccaagttcaggctgcaggaggaaacktctcaycaggcccgctggaaggtggggtggtgatgaaatgtgggggttcttcagcgagagtggaattcagtaataaggtgatcatcactgccgggcggtgcctggactcatgatgagccaggactaggtgagtgcagagggctggtgagcaggcctgatctgtgaccccggtggccctgcggctctcagacccctcacataaaatcccatcagggatattccgttccctggcccggaatgaggtcttcgtctttctgatcgcccttggagagcccaacggccttccgtcactcactcagtrctgatgtccagtcccggcaacagtctgactccgcccagacttggcgcttcccctcccatgcgcccgccgcccggcgtgctccctgctggagggtgacatggggaggggcctggctgcagcccttttcaggcagctcttgttggctgggaagggagcctggggatgggccgccttctacctgccggtggctgtgcccactctgagtgtgcttggtgggtgattacagctgctcacagctgtcaggagtccttcacagggcagtctggaagtttcctgtagagctgtctcctgcagagtccttacctagggagaccccgctgtatgtcctgtggccagtagcatcctgtggctttgctcaatcccccaggcacagtgtgtgcacccccagcctccctctgctgtgttctccacgcccctctgggcagccggcactcaggacctaaggtggtcctaagcagctctcccctgtcccctggaagtacgtggaggtaaaagctgcatccctggcagaatcagaccccamactccagacccttttgctgtgagtctcaggctagggtctcccacctgcaggaatcattttgggccttttgagggtctctttcayagacgtgggtggggcgtctgctcagcacctgctttctccttcaccaactcctcagcctcycrtctctgaccccataaacgctgagaggagaaccaggcctggggggcaagttcaaggactcaggaggcagacygctggaatccaatctctcccctgcccttactagctgagcggctgttggcaagttgtcttctctgtgcttcagtttcttcatctgtgcaatgggggtgataacagcacacaasaacatcttggagttgttaagaagattcagtaataggtgtaaaatgctaaagctggggcctggctcccaggaastgcccagaaggtgtactgtgataaccacagacgccacgtcaccccgctggacctggactccgtgaggagggggctccccatctccttatcccagtgtcagcccgctgctgggtaaattcgctcgccaagcccataccaggtgctaatggctgcaggagcctcttcctctccctgacatttcccttcggcagcaggcggacccctccttcctcgcccacctccatccttagcagccctgatacctctgacaatgctaattaaatgcaacaacctcatcagaaggctcgagctgggcttgcctaaggccccctctctgccctgagccctgatggatcattaatggtgtcagcagcacttatggtgatggacgargggagcaagtcccccgacgtgctggggaggaagtccgtgacgagcatcttcatctcctgtctgcaggcctcggccagagtttccagggaacgtcctagtccacagaatcgtttgaatttcacatttaccctgggagaaccatggccaggcagggatgtcaattcccattgtatccatgaggcagtcagggctcagagagggcaagagatttgggtgagggcacacagctggtaagtagtggggctgggactggattaccacggctttgatgaaagctgcagggggcatctgtaagatccaagggcgatgtctcccccaggtggcacgtggagaagaaagccagcaagtgccaccggcttgggggtagcccagttctcgggggctggagcctgcacactctcatctcagctctgtgtcagtttcctagggaagctgtgacaaagtgctacaaactgcgtggcttaaaacaaccgaaatttgttctctcacagttctggaggccagaagtctgcaatcacgatgctggcagggctgggctccctctgacggctccagggaggactctgttccaggcctccccaccagcttctagtggtggctggcaatccttggcatttccgggcatttccaggcattgggaggcccggctcggccccccaaagtgctgggattacaggtgtgagccaccatgcccgtcctgcccttcattcttgatgcctcccttcagcctctgcctctgtctccccatggcctcctccctgtatctgtgtgtgctgtgtcttcatatggacttcttatcaggataccagtccttagatctagggcccaccataatccagtaygaccgcaccttaacttgatcatctgcaaagactctatttccaaataagttcccattcataggtaccaggggttaggattttaacatctttttgtgggatgcagttcaacccacgataccatctttgcccatctctggctctggcgtgcagggacctgttactgggcgggtcactagggataccacctctcacctctctgggcacccattggtaggcctgtgctgtgcccagcaccagggggctggctgaggcctccttgtycagtggctcctgtgtgcctctccacttgggggttgccctagagctgcccaggaagggaggaggcacctcagggggggaaggacagcatgagtttccatgggcttctcgtcacccacacagagtgacttggaataatgcacccagtggctgatctggggccctgagctcgaggctgcagccagtggcagctccaggccctgcagtgtggggacagcgatggccaaaaagagcacatgccaaaggccctgccacttaggggactttgggaaagtttgaccaagtttccttgtctctaagtarggaatgataattggtcgatgggattgttctgagatgaaagtgctggtccttgggaaagcttcagctgaaatgtctttttattttgcccttcactcttttttttttttcttcactgttgtcgcccaggctggagtgcaatggtgcaatctcggctcattgcaacctccaccacctctcaggttcaagcaattctcctgcctcagcctcccagatagctgggattacaggcgcccgccaccatgcccggataatttttttgtatttttagtagagacagggtttcatcatgttggctaggctggtctcgatctcctgagctcaggtgatccacccggcttggactcccaaagtgctgggattacaggtgtgagccactgtgcccggcctgcccttcattcttgacgaatatttcgactgaattcagaattctgggtttccaggttttaacattttctttcggcacattaaaagagtcttctgggtgccattatttctgctgacamgtcagcagtctctgagtcctggtgtctctgaatgtaatatgttgtttttattctagctgctttaacattttctcattatttcagtttccagtagtttgcagtttgaccaggatgtacctgggtataattttccttgtgcttatcctgcttggagttagctaagcttcttaaatttgtaaattgatgtcttttaccaaattgaggaatttttcggtcattatttttttatgtgttctttttagtatatcttctctctcccctccctctacaactccaatcacatgtgtgttgaaccttttgatatgcaacaggtctttgaggatctttttctttttaaaaaaattttttttctctctattcttcagactgggtaatttctattgaaatcatcttcaagttcactaactcttctattttctcagactttctgttaagcaatttctgttaaggtgtgattttttttctgtctcagacatggtatttttaagttatagaattttcatttagttcttttttaaattgtttatatttctctgctgagatttattctttcatgaagtatgagccaattttctttacgtcttttaacacagttatcatagcaagtttaaaaatctctatttgctaattgcagcggccagcacatttcaggtgagtttccactgactgtcttttatattaagtatggctggttttcctatttctttgtatatcttcatataattttggatgatatcctgggtgttgtgaatgatagcataagagcgactctagatttttgttacttctccccaaagagcatttttgttttgctttgtatttgcaagcagttaacttggctgaaagcaactgtaaaccatctgcagtcgtgagtggtgggcagtggcaggagcctctgttcacttcttctagccctggctgggttgcagctgctggaagtctgtcctgtgtgtgtgtggtttggggtcagcccaagacatgggcagagtttatttgccccctmtggggatctgtcttggtggctctcttcattccagaatttactcccacatttttccagctgctgcgagtgtctcagactctgtttgctgctctatcaagccagtgagactctggctttccgtctgagttctggcagccctatgacacaggctgggacttgtcytcaggctgtgaaagccatgagaccaggaaagccaacgccggctgttcctcccaattgctgaccgcctgcagcatctgctgcggcctcaccctccgatgccttcagagtgtcattttgttgttgttttttcaagggtttatagtctatagttatctgtgagagagttgctgcactaggagctactaggctattaccggaagcatttagagcagggcctggcrgacagtaatcacttaagaaatgtgagttaatgtggtcaaccatagtgcggcgctgtttcctctggtcaaggctagagacaacgtggacacagacagcaccatgcaggaagtgtcagtacctagtgaagagcacacaatggccttaagactgcacttgtaggccgggcgcggtggctcacacctgtaatcccagcactttgggaggtcgaggtgggcagatcacttgaggtcaggagtttaccaacctgaccaatatggtgaaaccccatctctactaaaaatacaaaaattagctgggtgtggtggcaggtgcctgtaatcccaactactcgggaggctgaggcacgagaatcacttgaacctaggaggtacaggttgcagtgggccaagattgcaccgctgcactccatcctgggtgacaaagtgagactctgtctcaaaaaaataaataaataaaataaaagcctgcagttgtaggagagaccacttaactgggggagggggaaaggggactatccaggaaggcttcctggaggaggtggtattggagctggaaatgtcagataatccaagatgagaagatggactttcttcacagaggtggctgccaaaacaaccaattttatggccttactgatgagaatttctggcactcaagagaggcaacttttcctaaggcaaatcctgaagacatttacctataaaaatgagtagacattaaacatccactagctccttcatgggccagaggaagcagtgctcaggcaagaggggatctgaggtctggtggtggttctgtagatgtttgcagggagcgactggcgggactggtaggcgggaccatccacagtgaggttgggcgcccagatccatcgccacattgcagagcttgtggctgtcaattctgtggcagccaggagcacaggtgaccgggagctttagtttctgtccagtacattttggtgattcattattcctggagtcctcgtcttctcttcctccctcccagaccctctcacctccttgtctcacttgaacctctaatcctgggaaggctccaccataagcacmctacagataatgaaaccaaggctcagagaagttgtgtggcttacccaagaccacacagctgaagcactggagccaagactccaaccagcacttctgtctgcaaagagctcatggcgtagtctctcatggagggagcctccatctcctctgctgccaaatggaaatcacagtagtgtctcccgcaggggctggcgtgaggttaaaggaggtagcagatatgaaaatgacatataaattgtaaattgcccacagacattagtgtgtgttgcctggtaaccacccagcatttgtggactgcatttacttgggatagcaatagttatattggcattttaatttaatagcattgttatgttcccatcataaaaataatatacactgtgtgtatgcccaccctcatcaaattatatacattaagtatgtgcagcgttttatatattgattgtacctcaatacagctattaaaaaatgatgtaacttcattatagaaaatctagaaaatatggacaagttgaaagaggaggaaatattattttgttccagctaccctaaagctacctccgttcacattttggagaattctcttccagcttttttccccactgcccagtttctttgcttatttcacatggctataatcactgatgtagatcattacaagcattttatacccaattttatatcccgttccttcaccctcagggggttttaatatgaaatagcaagaaccagcgccccatcggggaccctagcacagctggkctgggtggttctggcttctgcccagatgtgtctgggtgtccctgggccagggcaggctgccccacggagggacaatgtcaggacagctgggacctgaccctgttctgactccatgcccggtgggcgtttccgtgttcccacagagctgcttttcttatcttgtctttttaagttcartgacatgtgcatctgtcttgatggatggatggatacgtccagcccgtcatcccacttctaaccaccctctctcaatcttttctgttgcctcaaagctggcattgactcatggctcagaaggccagggcaggccaggagctgtcctaaaaggcccagactggaaaaagaaaaggcatttcttggatagatatctctggcctggctactgcrtacaggcaccatttgaagccgtgaattaagcctgaggctcctgccctcatgaagtttacgttctggccaggaagagagccyacagatgataaaagcctttacagaaagaaaaacatcagattaggttggggcagggatggtcagggtgtcctgtatgagggtgctggggtgcagacagcagtttcagcaaggtgatccaagctgtgctcacgggaaggcaacagtggggcagaattggaagaataggaaggagccatgctggtacccagggaaagccactgcaggccgagagagcaggtcttgggacagcaggtggccaggacttttgggaaagggcaaggagcctggtgtttggaggggaataagcaggtggagagcagtagatgaggctggggaaggggaggaggtaccttttgctgagttaaaaacacgagaccccgtgcatacaacagtaaatgttttcatcatcttgcatctgcgattctgtggtctgggcttggctgggcttgccctgctctgtgggtcagtggggccctgctggaggctgggcttggccgggggttgggggggttcttctgcacccactcttcctcctccccctcaggggccagtgggccagcctgcgcaggtcctgctcctggtaccgccagaggcgttgatggcaacccccagtacctaagcccctttgcatctctgtttgcggcttgtcraattgccgttctgcaggccaaagcaaaacacagggacaagcccagaatcaaggtggggggcagagaacaggtcacctggcccaccatgggaggggtgaaggtttggctccagatgcggcccacctgggcctcggcaggtgggggctgcctttagaacactctgtgcttttctctgagtacacaatgggagccgctggagggttttgagcaggggagtgccaggatcagtcctgggtgttaccagcctctctgctgccagtctgttgaggctacgtcatagccagggagaaagagctgtggcagtcatccagtgagaggtgggagagtggctggcatcccgatatgctgtgaaggctgagcaggcaggattggatgtggggtgtgtgtgtgtgtgtgtgtgtgtgtgtgtgtgtgtgtgtgagagagagagagagagagagagagagagagagaacgagaaactccaaggcttgggcctgagcaagtgaacaatagagctgtcatcacctgagactggggaagctgcagaggatgaggctgaggagggatcagaattcagttatggtgaccaatgaagggttttgaatagagggacacagggatgcactggctcaggagtttggtcatcacgttggccgccagagggagaacagaggctgggacagggaaccctgtggagtgtcctctctgtggctacagggagcaacggtcagatctgtggctggtttgaaagtagatccattttgctaaaggtggtatcacagattttggagactacagaatccaggccaggagagcaaagaacgacagaggtcccattcacagcagcgggccatcmcgggctcctactagcttttgctgcttgggcctatggggatggtattctagaactttccatcttccaagacatactggaaatgtggatttttataggaaatcttctacttttcaaatattaagaatgacttcaaattaaaagtaataatcattttggggctgcagtaaaacttkttggtggagcaggcctcaggcttcaggttggtgagctgtcctccagtgggggtttctcttccaggctagggccttgtcctcccctgctctcccccactcccagggctggccacccagaatgtgcaggccactcatctctgtgactcgtagaacctgagaatgttggtgatggaaggggtgttcccctagttcccacatgcaaaaagtggggcctggagatggggctgtcttttttctccaaacacttgcccatccaggaaggccagccctgggcattgaagactccaggtatgggggtgactccataaggagaggttcctgagtgacctgaagaaacatggttgggatgaagtgcagggagggtcagggcaggcagggctgagcttcgcttctgcgagcagagattagagagcgatcccagaggcctgcctggaggtggggccacagagcaggagtctgaaggagagggggtaattcacctctgtcctactgtgtgggaagccctgagtgggcccctagcagagggttgccttgcgcttatctatggagatattgggaagggcttccctgacccaggttgctggagcatgggggcctgggtggcaggggtaggtgtgggagattcaagacaggaggatgaggccacatccaggtggcttcagataccaccgtgagtcccatagagtgtccagttactataaagtctgccagccactgtggtcgccccaggcctgtgccaagtcccgagatctctgccctgcagccagtgcagagggaagaggagggcaggaggggacaggttggtggcccctcgccgatgctcctgacccctcaggctccctgctgcctcctgcccagggctgtggggcctcggggagcggggagctcgccattgctgtggcactgttgagcacccgggagaggcgggttctgacagccaccccttcccgtcttgctgttcccctcccagctgacatcatctctaccgttgagttcaaccacacgggagagctgctggccacaggtgacaagggcggccgggtcgtcatcttccagcgggaaccagaggtgcgaagccctgggtctggtgggaggtgggaggggtggggagcagagtcaggtgggaggcgggcatggtgggaggggataaggataagggggataaggggtgatgcggtgagaggtgggaggggactatactccaacccacaagagggcttttaactgacaggaggtgtggggtgtcttgcctggatcacatctcccaggggcatggattccaggggtgggaatgggatgctttggaatgccgaggtgggagtggcgggcggtggtagggggagtgcactgggtgggctggcaaagccaggttctgagccccctgccctcagccgatgtttgcrgagagctgcctgcatcccatgctctgtcctagaccctggatgaatggtcaggatgtggcacaggcagctgctgccccagcttgtgccttcagtgaaaccttcctctgcctgggtgacctgcgttgtcctggccagactggggagcgggaggactccactcttgcccagctgtcacagccctcagactgagctaggtggtttttgctcaggcctgggcccttgtcctcacccctgtcctcacccccacccccgggggcttgttgtccagcagaactctgggtaagacagcagtggcctggacaacctgcccaggaccacgtttctggaacactgaaagagcctcgggacaaaagcccatttactgagaacacttgctaagtattctggagttgcttctggtttactctgcactgctcacctccgagggccagatccacacccctgtgacagatgcggaaactcagagaagccacccagctagtgaacagcagacctggctgcccgacgccaggacagtggccagcaacgtcacacaccacccggcctcagagagggcgtctccccccgcaaacacggactgtgcctggaattagatgcagaagacatccaggaaaccaaggaggagggaggaggggatggagcaggagaggcaggggaggggaggggaggaggagaagagaaggtggagaaggggaggtaggagggaggggaggaagccgggggtgaagagaggacctgcggaatcatctttcccccgattcactcctgagcatggcccacgaactgaggatccttgagtctgactttatcttggtggctcacataaccctcctcacggtgaccctgtgggtgtagtgcagtgcggctactcccctcattttacagaggaggagcccagagtgcagagggttaaaatagttgacaaggggcacatcctagctgccaatcagttcctcaaacacagcactcggccagcacctgtgggcttcaccagatgcacctgtggggtgtcccaccaggcactgcgaagctcagccttctttttgccaagctgcagaaagagattggattggttgatgcgattttcttcattttgaatttttctcctttagtgttttcttccttctagtcccactgacctttgtcatagcgagtgctcatgggaagtgaagtgaattagaggcaaaaatattggagaacttctaagcttttcaaaagcaagacagggatagaaatatagatacttaaaaaaattaccaggaaatcttgaaattgttctgggttgaatgtctccgtttctccctggttggggtttcgtgttgtcgtatgagttgaactctctcctgggaacgtggtccctggcgcacacagtggactcaccacctgactatgctgggagctccacggtcaagggtctttattagaaggagctctgctgcctaaaccaggccaagcactgctgaggaaagcyggggacagattccaatccaggtctgacattgccagacattctgtcccaatgttaaagtctgctcccaaattcatttattcctcaagtcaggcctgagttggacacgtggaatccaggagcaagtcagggcccaagacacgagggtggccagagcctcaagccttggcgtcaggcaggcctcggcagaggggtgctcgccggagagtgacctcacggctctgggaagtcacttcccctctgagtctctgtttgctggtctgtgaaatggggagagtcgtggtgctcaagcagaggaggcctggagggtagaatgcgatggtgcrgggaggacttagtggggtgtccagcttgtagcaggcgctggggaacattcgcattagcaagttagccggctcgggtgtgagtgtttcatgggaccgcacgggagcggggcttgtccctggcacactgcaagtcatgggccggttaagctgcagagagtttcatttgaccctcgaattggatccctggcacggctcggcacttggtcccacggccggccctgctgggtccccggaggtcctagccgtcgccctgcaggtcacggtgctcaggccccttctccgggtttccctgcagagtaaaaatgcgccccacagccagggcgaatacgacgtgtacagcactttccagagccacgagccggagtttgactatctcaagagcctggagatagaggagaagatcaacaagatcaagtggctcccacagcagaacgccgcccactcactcctgtccaccaacggtgaggcgctgcccggcctcgcttgcatgggcacaggccgtagatgtttctaccaaatgctggtttgtatttcacttatattgtgagcatttttctatgtcttcagaacgcctagaaaataatatcctttttgagcagcatrtaaatcccatgagtgagtatgccagaccccctcagacgctccctgtgtctggacacagggctgcccccctttttgagcagcatgtaaatcccatgagtgagtatgccagaccctctcagaagctccccatggccagacacagggctgccccctgctgtgaatagagccatccgagccatctttgtaggcctttgctttggggtgagggagtgtgatggacaaggatgcaggtcgcagacacgggggatatttgacacaaagtgaacccctcctccccacgccgaatccagacccctagactggggctgtcaccgcggccttgcggggcagtgggaggagccttggtttaggaccctggccggcctcttaatcctcttgcctcagggaggagcatgtacccctcaggcaccggaggctctcggcctgacgcctgcttcccaggctccactctgagggagtggctggggctgtcctgcttggctcaccatgggcctgggtcccccactcacgccccctgcccatcctccttcacctgggccccctgcggacccaggcagcctggggtcgggtaggacacacctggattcttttttttctttttttgagagacaagagtcttgctctgtcacccaggctggggtagagtggcgcgatctctgctcacggcaacctccgcctcccgggttcaagcaatttttctgcctcagcctcccgagtagctggaattacaggcgtccaacaccatgcccagctaatttttgtattttttagtagagacggggtttcactacatgttggccaggtggatctcgaactcctgacctcgggtgatcygcctgcctcagcctcccaaagtgctgggattacaggcatgagccactgtgcccagccaggacacacctggattctgtccctgccctgcctcccttgggcagtgaccttgctttcctgagccccagcagggtggacacatctcccttctggggtccgtgaaatggtgcccactcaaccccctgagaacagtaaccgctgcacaagcaccagccaggcttcgaggtgctgtccccacgccttccccgaggacgtccacgctcctcagcggggcctccaaggctctcccgaacatggctaggcgcagcttctgccagcccgcctgtgcctgaaggctatcctcgccctgtacctggccaactccctcctcatcccataagccttgctgggtgcccgccttttctgacctctccactgagccaggcatccctcctgtgacaccctggctcctcttaactccggttcaccccctctctgggcacctgctgttctgatggtgttctcccgccatgcacctcaaaggcaggatctgtgtcccctaaggggccctgcccagcaaatctgtcacctgagccagcagagcatgagagatcctcccgaagggcaggccctgggggacaggagcctcgtcctgtccccatgcacctgctccttttgaaaatatttaagaaggacgtgtcagccacatgcggtggctcatgcctgtaatctcagcactttgggaggctgagatggatggattacttgagcccagaagtttgagaccagcctgggcaacgtggtgagactctatctctacaaaaaaataaaatattagccaggtgtggtggtgagagcctgtagtcccagctactcaggaggctgagattgaaggatcatctgagaccggtaaagtcaaggctgtagtgagctgagatggtgccactgcactccagcctgggtgatgtgagtgagaccctgtctcaaaagaaaaaaaaaaaaagacatgtcactttcttcctgcctctctacagaaaaggtcatctttcagcactccctacactccgctcccctcaaagcttcccacctgggtttgaatcctggcttcactctttcctaatggcagggycttgggtacctttcagatgctccactgaccccagttctcagttctcttcccagttccttctcatcaacatggtgctatttgttttgactcctgtagtagtcagggttctccagagaaaaagaatcagtagggtatgagagtgagaaagagaaagggggatttattttaaggaagtggctcacctgactgcggaggctggccgttccgaaatctgcagggaggccgaaggctggaggcctcgagacagagctgcagttctggtccaaagccgtctgttggcagaaccccctccttccccaggaggtgcctcatgatttcaccttctaaagtggatcttctsttccatccggctgcttaattatgtgactcgctttattttgttctgtttttaaagataaaactatcaaattatggaagattaccgaacgagataaaaggcccgaaggatacaacctgaaggatgaagaggggaaacttaaggacctgtccacggtgacrtcactgcaggtgagctccggngagsgggaagcaggcacacgcctctttattacacctgaggattttagggctggaaaagcctttgagatttgagccagagtcaggtgcagaccctggttgggctgctggctgctgggcggccacgggcgtcttcctgccccttgcctcagtttcctcaccagcagcatacagatgaccacgtttcttctaggcttcttgtgagcatgcaggggtggtgtatggctntaaagtgcttttcacctatagctgagggtggagagcaaggcagataatcccttgttataagaagggggaaactgaggcccagagagagacagcaactcacctaaaactgctcagctgagtgagtaggcagaggcagaaagagaatgggtcagcagagctttgtggctcctgagtcctttactgagggcagaaggaagcctggaccgtgtgaggccttcagcatctacaaaggcctgaaacagacataccctgaaacagacacacacgtgcccagcatccagtgagccgccataaatataaagcagtagtcagtgctcttcctgagaagaagaaataaatgtttaaatacattggcctaaatgactggcaaattgcacaaataaattctgaggaagtgggcagccgattagcttcgatgttgagtaatgagggtgctggtgccccctgccccacccccagtcccaagaaagtttatgagggtttcatctagagggaaggatacagcgatcacatcttgatcaccctggtgtttggggcagagccagtggccttcataaaaatcctgtttatgtccctcccagcgttggagatttttctctgtaagtcacacacatcccaagacacttaactgtcactgagaacctgggtgccctggtctgtcctcatcctgcctctcaccttgtttgcttccgatttcacccacgccacgccaaccctgcacagcattctacccaccctgcgcagttcacactggaggcagctgtttactgaggagctgctccacgctaggccccgggctagcccttggggccctagaggtgagcaaggttcaactcagtacctgtccccaaagtgtccccagcccccaaggaaacagacatggaatcgccatcacactggcgctcagtgcggtgacagaggaacacagagaggccgtgggcaccccaggaggcctttctctactttgtcaatttggtgaactcccatacatcccataaaaccctactggccttcacctctgtaaagcctttctgcgcaggccagatgacaattgtgatctttcctgtgtcccctcttgccttttggatccgacactgtctgtccttagtgtctgtatcttccttgcccctcatcttgactagactgtggcttctgcggaggcagcatgttttactcatgaaacccccaaaccttcagggaaggtttcctttctctcttcttctctttactaaaaaactggttttgagctctggtttggtggatggcagcaaatggctggagcactggatgaactgggtcccaaggccgcctggagaaaacagraagcaatgttgccggaaggaagcaggaggtggactgagatgccaagactttgctgggccagtgatgctctgcccttctccagagcagctgggctccctctctctcctgagagtccagggatccccagggtgggcagtggctgcaccccgaaggaagggaaggttagcagcatagctaaaatatctgacacaggaatacgtgcagggaggatgccttggaggagtccagacacactaacaccaactcccaggcacacaacctagaagcaaagacacagaggcaacaatgcaagaaccacccagagccaggctgtcactcacaccggtgctgcgtgcacacacacacacacacacacacacacatgcatgcacatacacgtatactcagtcatgcatgcacactcacatgcacactcatatgcacacactcatacatgaactctcagccatgcacactcccacacacacaggctgggtgccctggtgtgtgggaaaatttaacgtgggctgcagagctgcctctgctccaaaggagctcagtgcttgtcactccgactgcagcaccgaggctgtcacctcccatctcagctgttccctgagagctcagggacacagcccattcattcattctctcacacattcactcattcactggagagtctctctgctaggccttggactgagcgctagagagatggagagataaacaagaggtgacgccttgctcccgtagctgatccctagtccactgggaaagctgatgggaccagttgacagcctcagggttggtcagggctgtgcaagggaccttcagggctgtgaaagctcagtgtctgatgccatggcaaggactcctcgcaccaactgtctgagatgaaagttcgtatgagtcaggctaactccaccgctgtaacaaaacaacaccagcagtccagggccgagcacggaaatgcatttctcactatgggaaggttcgatgtggatgtgctggttgggacacagctctcctgcaggatccttccatccccatcccatgagtctcagtccctaaggcttgggtcctcaccttccaggtggggaaggtgctcccgctgcttagctgcatcagggccaggtatcactttgctcacatcccattggtcagaactagtcatgtggccatgtctgggcacaaaggctgctgggaaatgtagtccacatgtagacagctgtttcccagtgacagcactgcattgcaggaggaggtgaggaggcctggcagacaattggctggctctgccacagtatctttttgtttcattttagagttgaggaaattggggtataggagggttcagccacttattcacagacccacagcaggtaagcatccatgcctctcttgcagggctggtgggcggcgggcatttgccatctgtcactgcctatttcagaccacggaggatcaggatggacgcccacccctgtgttccagcctccggttgggatcacatgctcayggcatgctatgtcctgatgccaccrcctggccttcacctcttccctgcctcctcatcctctgcaggtgccagtgctgaagcccatggatctgatggtggaggtgagccctcggaggatctttgccaatggccacacctaccacatcaactccatctccgtcaacagtgactgcgagacctacatgtcggcggatgacctgcgcatcaacctctggcacctggccatcacygacaggagcttcagtatccttcactgtggccttggccagtgcctcccacgggcagagtagcttccgttgggtggygggtttggtttgattggcagacagctggtttggggatggctgcattgtttaacttcttcagtgaggcacctctggctcctagtatgcgtgtgaggcccagatacaaaatcatgtcacgtctgtttctgaaaaccgcaaagtcgtggttgctgagcattgcacccatcgcctcctccagcatggccatgatcccctcatcctagggcctcacaaggggccaggaaggagacagagttcagggttcagctgctctggacgagggactgctggccttgctcagcgtccactgaaggcgcctcggggccctccccactgggacccaaggcaggctgtgttagcataggaggaccagcactggggccccggccagggcttcgggtgacaaccagggtgtcagaagcccagctgggttggggtcctgagggccccctgctcggtgttctcctgtgtcagggcaagctaggggaagcagcagcattgacgattcccgccgactgctgggaagagagctggtgatgacatgagcaccagcctgcaggcagggcgaggcttggcctgccggggggctggtgggcgggcaggcaggttgctgtgatgtcactattctgcatacaaccaatgataataataattataataacacacagtgagactctgtgtgccaggctctgtgactaacatcaacaagcattcattttaactcatttcaccttcacaacaaccctatgaggtaggtactattctaagtctcctttacagatgaggaaactgagtcacagagcactcaagttaacttgctcaaagctcacagccagcaagtgtcaaagctgggcctgaaacccaggccctcaggccccagactccccgcttctaacctccataccacactgccctttgtggaggatgccacccaggtgtgtcttggaaggggtgggaagaccctcctgagagcctccatgcaactggatggcctcccgactccaggcagcctgggcacccagcagtggtcaggagtgggctgtgtccctcggagcagtagaagccgggatagctgtggggagcaggggaggcagggagcattccaggaagggtgaaagagagtaacaaatggcttttgtggtctgagatccaggcacagccagagacccctgggcagggagacccttggaaaacagcgggaagggaacagagcaaagcgttggatgtcccctgagccagccagagggtgcggggcacatgtgtgggcttcggaggcagaaagtctgtttgggtctgactgccaccttcaagctttgtgaccctgggtgagtacactcacctccctctccgagactccgtcttttcaatcatgcctcctcatagacctgtggggtgccgtcagtgagcccctatgtgtgatgtgccgaaccctaagtcagcacttggtgggtatcaggaagcatcagcatctctctcccttctcttgtcccaaaggcatggagtgcccagagctgggaggctggattgggccagccaggaaggttccaggaaggattgggacctgagctgctttgaaggcttgaagctcagatttctctggacatagagggctgggctggacatctgtctgaccctccactgaagccgaaaggacatcgggccccaccagtccacagtgctcatagcagcagttggttagactctttctgctgcacgagcatgtttgatgtggataactgtaagagagctgcrggccaggtggcttcaggggctggagcatcgtgggtgatggctctctgggctgattgcctctgctgtcttctgtgtttcaatctcaggtgccagtagttggggccccaccctcccagaataaagtccaggagaaacgagaccagttctctctgaactgtcccactaggaccctaaatggcatcttgtgggctctaattgggggtgaatgccttgttgtgattggccaggccggactcctgtacctctccctggtgctggagggagtcagctccgcccccaacccctggatgtgggggaggggcggtctcctagcaggagctccaggtctgcaaatggggagggtgtggggctcactgagcggcctggaccgtaccgtacagtttacaaatcagcctgccgttcgttgtctcacttggtgctcagagacagtggtaatttgatgatcaccccatttcacagatgaggaaacggaggctgggggagatgagggactggcccasagtccccagttggcaggggcagagccagagctcatgctcgggcctccatgcctggtccagggcttttgccctggcctcggcctgccccctgcagccctgggacagtggcagccacccttctcgagcacctgcttccttcctgccggacttgggtggggatggtaattgctgctcggttttcctgtctgggctgctgtgaggattccgtgacactatggatgccgaaaccctttctaaagaaccataaagccctagagtatggaagggatgctgcttcatttcatttattcaaccattcattccccacgcctttctactcccaggcccacactgagccctagggacatggggatgaatgggagaaactcaacccttccctggagggctcaggggctgctgggggacacagccccgccatggcagtggaagtgagggagtcatccttgctgtagcccagggtctggacaagctgctgtgggggccgccaaggaagccagagaaggaatttcggtaggaagctccctgggctcgaggaggctgcctgagggcatgggtgtgcaggaggcggatgcatgaggaggcagaaggtgccggagctgtggcactgcggatggtgcaggcagggggctttctcttggggtaggggccccgaatgccagtcattcacaaaaccccccacagctgtgcctgcctccacatgccacgtgtgcttccctttacttttcccatttaaaaaaaattgttttctttaagtcaagttgctttatttttgccgaagtaattttcttttgaaagggaattgaatttcaccatgataagttaaagtatcacataccataaataggaggtagcctcaaccataacggctgtgcacacaaaatggtgggaataaaatacaggctcagccctgtctgttggaactttctgtggtagtagactgcttcgtctgcactcatggggcggcagccaccagccccatgtgcctgctgagtgcctaaaacgtggcttggtgactgaggagcgacatcgttaatttgatttagttccagttaatcatacttcaaacgaaatagccacatgtggccagtggctactgaacaaggacgctgcagcctctctccaggttgcccttagaccctgaagctggttctctctgaaaagatggaggtaaacatgtgcttcaatgttaagggggagagtgcaaaacagagacatcccccttcattcatcagaagggttgaatcctgtctccacgtctgcatctatattacattactggaggctgtgccgacttcccacctgcctgcttccagggaacgggaaactatgaagctattgatgtactgtaaacaggggcgtgtcactagccagctttggaggtgtgtatgtcgtgggtgtgtgtcgtgggtggattggattccagcagacaaggctggcggcttgggaaccagcaaggagacccggggagagagagtgagaggcagggccagagcgtggccacgggtgggaggcggtggaggaatgagattgtaaggatggaggtgtcatagatttggattgtatcataaccagttttggatcggggtggccacaagacattcagacaggttggctgtaaagaagaaaagggggttggttcatcccaggactgcaaagtcctccctggccgttaccgtgagccttgcctcctgtcccgtcccgaacacacagattgtgccctgtccgcatgttgcagagcacaccatttaccagcaggtatttattaagcacctactgtgtgccagccctcttgggtgatgctggaactagataaagattctgcctccaggagtggacacgtgataaaccattggtaaaatacccggcattggagcaggtggtccgtgggtgctacagggagtcggtggcccagccagcgcagccgtgtacatttctctccagccacgcctgctgctggctgcaggcctcaggtcggtggagggtaagccaggggtgtggtttttgccaagtgaggatgtagacacggagctgatggtgtgtgcaagagcgtgaaaataatgattattgagcaaagaatctgagccaggtgagggacagtgacaagggaggagtgtcagcagatcgggggcccctgtggatcctgggaacatccctggccgcacaccctgccgtgtaactcagtgtcagatctctgtgtaacttcccattctgtgaaaatgattattarttcatcaaaacataaagcaccctggccttagtgatagaggagtgtgtgtctatagcatgaacaagattctgagctgggcttgaggcagccctgatagggcaacttaggcatttggcaggagttgagtggagtctccaggggcacatggtggccatggaaacctccccgattggatctattcattggggaacctcagtgcacctggtgctccccatggcctgttgccgcttggctccccatggggtgctgctgcagtgacaagacacagatccagggctcacaccacagagagaagccttacttggcagagaaagtgtgaggactgtgggctgcaggtgctgcgatgrggactgatagcagccgagtaatgagaggaggcgtttcatttctgacatgggaggaggccagaaaggcagctgagaccccatgcggagctgggaattgctctgaatgtttgagataccttctaagcaagtctcagtggggcggattctggctgtcagagggtgacagttctgatgagtcctgacaagaaaaacccagggtcaggaggcctgtgtccrcgcagagccaggggaaggcttgggctggacttggggtttgcatccttctgacccctgctctctggggtcctcactcggcccgatgacactgttcagtcctccgtgcccactggaggttttccaccatgtcgcatctcctaagtccaatcactaacacttcccgtctcagcaaaatggacttttagtaaccatatcaagagaaaggaaaatgtttcttagtaaaggagaaaaagagggcattgctttgactattggacaatgagaaaggtgactcagaggacatctctgctggagggagggagcctggtgatactgaggctctgtgacctgtctcggtgtagtcaccaaggttcaaggaagaggagccctcccagcctcctccctctctctcaccctcagaatggaaagaggtgcccagccctctctactctccccagacacttgcctgaatcccgccctgtcctgcccagagccttctgcacagctgtgaaattggctcatcggaacctctggtctgaccatgtcagccccccttaaaactctcacgggttcccctctggcttctggaggaagcctgagcccctccacagtgccctgtgcctttggtgaccagcccctgcccacctctcgggtcacactggctcactccttcagctgctgggtccctggcatggggcagggtggggtggagcactgccatccgccatcccttctcctgaccatgccatctgcctctttggcctggctgactcctgtttgcccacttgcagcatctcacagcccattatctgggacagcctctgacctgtccctgccacacccctcctaggctggtcagagcccctctaagcctgcggctccttggctgcccccggtcacactgagtgttttgttactgtgacagcctcctccattttatggtggaagccctgagattaggaacccagggtgaggcctctctgcatcccctgctccacataggacttggcgataggaggtacttatgaacggttgtaggtggagtgggctggaagttcaccatttccatgtggtcttaggatacagacacctcctttttgatctgggcgcctggggaatcagagaccccagaccctaaagtgcaggagaaggagcccgggctttgggctctggcgggcctgggctgagacccattgctcagcctgctgggccatcagcttccctgaatataaaatcagaaaattcccttttataaggatatttgtaaggaataaagaaatctttcacataaagagcctggtgcctaattggagcccagcaagaggatggtttattttgtctcttaaacaacagcccttcaaacatttaagattggttctcataaaatccctgcatctctgatggttaaaactccgttttccacggtgcagtttcaacgtctgtttaagcaacctctcgcgtcctttaataccaacattttgagactgttaacacagcactgggtgatttttcttgagtctgatgcatcttaaaggtaacaaattgcacaggaggtctcagcggatggacctctgctttatttttagcacccagagaatttaaaagacggttcgattgatttttctctcccttagtgatttctcacggtgggaactggcatcacaccaagcctcggcctggagaatttctaattcccatttacagagcaggtccgcacggccgggtgggctggaggggggtgcagccattcaccgcaggaggctcagaaccttcatcagcccatgcctgcctgaagactcagcttgtcttctgtgcagagaacaaaggagggagcagacacagtccctctgcatgcagactctgtgctgggccaagggaccctgagcccaggctctacccctgcctctgccactgaccctgatcagtcactcagtctttctgcaccccctttatcccatgggagtgtgtctcctttaccaggagctgtaaaggtggaatggccgatgagtatggggcctggtgccgtgtagacaagcaaccctcaccagcacatgacccactgtcgggtaccttacaggccacctcttcttcctgcccttggtgctaatttacagagaaggaaactgggatgccctgctcagaaatgctctgttcacggcatgtcagatacataccactgatggctgggagtctggacccctgggttcttactccagctctgccactacctgcccacggttctgtgcattcattggttgattcagcagcattggccgagagtcttctctgtgttgagcattggacttggtgctagggaagcagacagggtctctgccagggcctgcgagtacagttgtatgggttgtctgctgcccaaaagaggtgatgatccaagccaagcaccttgggaagaagggacttttttgtttttcagttctgcaaggaagagctgtcttttcataattggcacaaaggcactttctgagtgaatggggatcctgatgctatccaggtgaactttctaggtgagcaaaaagatagtcttcttcttgctcaagcctcgatgagtcctgtgatcccatcgtccaaatgcacccagagcccacctgcctgtctgcccccagcatgtgtttaggccactgtctcactctgatcatgatggtgacctgactggcctcccttcttaggtctaggagccagactgccagggctcagaccttggccccaagacatagggactccgcggcctcgggcagctcacttgggttctctgtgcctcagctcctcacctgtaaagcgaggaaaagcccctgctgacaccatacggctgcttgaggactgggtgctacgatgacatctgggaagcctttagggcagtgcctggcaaatcaccgagctgcagcatcattgcttcattagctgtgtttccccaggtgtctccttacagtctgttctcctacaacatgagaaaaaaaaaaccgacaagatcatgtcactccttgctcagaacccttcagcaacttctcccaactggaagtaactccgcccctttctctggcctccaaggccctgcaggagctggccctggcccctccctggcccacttcctcctctctccctttgctccctgggctcagcgttcccggccccctgctcttcaccatatttccagccatctcctgcagcagagccattttgcactggctgttccctccgcctgtgaagtttctccatcctcatccactcagtggacaccttcttaaagaggcgttccttgaccagtctgtcggaactagtccatcccctccatgactccctcgagccccttccctagaggcttggcctctacctcgttccctgttcatttcccgcctctccctcctggactggcagcttcttgagagcagggaccttgtttgatctacctggaataatgcctggtccagagtagatgctcaaataatggaactagtgtaatacagtgagatgggtgttaggataaggtggggaggaccccggcctccttagaaagtccttgatggaaaggcattgacactgaggcttctgttctggacctgccacgtggtcccctggcagtttgcttcaccttcctggacaccagtttccccttctcttggctggactggtgtcctgaaactggctttcatttagacagttgggctatccttgccgggtctcccttgatctggctatgtgtgaccttgtgtcttgccagctgctagcatgacacaaggtcacacacagcttgtaacagccaggtgtgcacatctcttcccaaatccatgttcatggacatctctttggcagcttgaatttggccatggtggtagtatttctttctttttcttttctttttttttttgagatggagactcactgtgtcgcccaggctgaagtgcagtggctcaatctcggctcactgcaatctctgcctcccaggttcacgccattctcctgcctcagcctcctgagtagctggggctacaggtgcccgccaccacgcccggctaattttttgtattttttagtagagacggggtttcaccgtgttagccaggatggtctcgatctcctgacctcgtgatccacctgccttgacctcccaaagtgctgggtttacaggcgttagccaccgcacctggcctggtggtagtatttctacagatatctacaaacactacaaaatcaatctctcccctccccagaagagagggtattgttcaagttaccagcacacaactgctctggggccttcacaaggccaggcagttggtcagtcagcctccamcatgactgagggcttcctgcgtgccatggckctgtccatggtgctgaccccgttgtgagccattgcgtcgaggtcagcatctccacctcccaccccactgtcactacttgctgtgtcacacggtgttctgagcacgctgccgatgttaactggttgaatcctcccaacaacactatgtggtaggcgttattaatatcccccttttacagatgaggaaacaaagccacagtaagtttcagtaatctacccaaagtcaaacggggaaagggggtgcaggggaaagggggtgccagggctgggattcagatttaagctgtctggatgcagaaccatgcacttaactgtcatgctacaccgcctctcagtcatgatggtaacaaccccagttgcagcctgcctggtgctggggtgaacaaatgcaagatgccgctgttgcatttcagtctcatgaccactcgccaggtgggggctgtcactgtcccaactcagcagaagtggagatgggcactgagaggtgggctcccttgcccaaggcccctctgagccaagtgtccttctgatggcctgcctagctttgttgagacagccgtatttcttggttcttgctttaggtcctgtggaaagacaggcccaattgcaggatagatgggaggttgttttgckatgagcatggctgtcagtagctgtatggcagtcctcacgtttgccctgcaggtggcatggtagaggtgtgcgaccctggcctgcctcctgtcccttcttgacagacctccctggcatttctagaactcgctccctgttaaaatcctcttgaccccaggcctgagccccagacctttggcctgcttccctcttcaggatgggtcctgccactcccagccttatgtcaggacccctccaccctcatagctcatactccatcaccctggagcctctccctccctgttagaactcctctccttttggacagagcctatgctccctctgagttctgctggcgccgcatcctctccagcctggctctcaccctctctgcctccctccctcatgctcagccacccagcctctcacacctctgagccttgcactccccctcttcaaccccctcaccccctccaacacacacacaccccaaacattttcccacccactagctctgccgggataattcctactcaccatgggcttcggagggcccttccctgactctgcaccatctcagggcctcgttataaatctctgacatgagcacctgtgtctctcttaggccattgatcgatcatggagctaaatctgcttccctgccaggctgggagccccagcagtcagggcggggtctggtctgctccttctcagtgctgtgggggtacagctgcctgggtgcccatcccagctctgtccaaccttggattccccctctcagttcttggaaaccaaggcatgccattcaccacagaccctcctagtgctcccagggggtgacaagcactgtaccttttgcatcctgcttagctgtatgcttttttcccagagggagagaaagactctgggagttctaatttaactaaattcaatttaactgtagccatgtgctgggtcttttgacatatgtcatctggtgaaatcctcattrcagccctgcaaagcagaagttatcaacccattctacagataagaaaagcagagcacagaaaggctgagttttcaagagatcacacagatgttaggcagtggggctggactttcaagctctgggttttgtgattcagaagtcaggactttcttcctttttcatagcttggttgattcctttctaagcacttatgaatcacctgaggtgggctatggcagagctgtgaagatggactcaccacacagagagcgtgcagggctcagtggcttgtgcagtgagcggtgaaatagaacagcacctttcctacggttccagcaagctgggttctgctccctgagaggaattgcataatcattaaggtgttccgagtggagaaggaaaggaggctgttacaggctagattgtgtctcctccatccccattcatatgttgaaaccctaactcccagaacctcagaatgagactatatttggagacagggccttaaaggggtgattaagttaaaataaggctggcagggtagaccctaatccaatctgactggtgttcttataagaagaggtgattagaacccacagagagatgttaagatgcaggaatragaatgtgaggacacaaggagaaggcagtcaccttcaagccgaggagacgggcctcagaaggagccagccctgctaacaccgtgttattggacttcggacctccatagctatgagaaacacatactgtttaagccactcggtctgtagcattttgctatggcagccaggaatcctcctgtaggatctgacatgccttggtctgagtgcttgcagctcatgtttgtagtcaggtcatcttttggagatttgctgaaaaagcagtttttcaagatgaactccatgtgtgggaggccttctagggcacctccgcatccggcgtccctggtgagctcatgcgtgagtccttttgtggctcttggcagggctgcctccatccctaactccggtggctgcttggttgccatggcgacagcttcctccatcctgagagcaggctcctgccgagacatctggatgagcctcrctgtgctcggtgaaatcggtggagcccaaggctgcagccctctttctcatggatccctgctctgcacccagcatcccccttgctgaggacacaagccagtccagccagcctggcatcagggtccttggggtgcccaccccatggggaaagctgcagatggtgtggaaatgcgtttactccagaacagtgggaggaacgctgactggaagttagggagccaggatttcagtccttactctgccagggctctgcatgtggccctgggcaaatcactgcccaccctgggcctccctctcctcctgggtggggttggcacatgggcagttcctgcctgcaggggtggactatttgactggtctgtgctaggcrtggctctctggggttattaccatgtctcaaagttcaattacttgctgtggtttttagattagcttgtcgtgggatctccactggggcccatcatgaggtgaaccagtatttgcacactgcttttggcgtttgtggagtgctttgcatacttgcttctctcttgagctccttgccagaaccarccagtgatgcttcttcatttcacatacctggctatatttccagtcagcagagatttgccctgtagaggagcgagcagcccttggttcctgtgcccaccttacaggagaggacgaccggggggcagactggtgcagcttagctgccatggctcctggaggtgcagccacctcctccagcctcacgtggggctggtgtggctgagctcgcgtggctgggctccaggagagcaggctgtgcctctggtagcaggagatgaaggagtttctttttttttttttttacaggtgaaataaattttaatgataaaattattttagtaataaaaatcttaataataaaatgtatttaactaaatatacccgaaatattatcatttcaacattggcactagctacatttcaagtgctttttttgttatttaagttctagggtacatgtgcacaatgtgcatgtttgttacatagctatacatgtgccatgttggtgtgctgcacccatcaactcgtcatttacattaggtatttctcctaatgctatccctcctccattcccccactccatgacaggtcctggtgtgtgatgttccccgccctgtgtccgagtgttctcattgttcacttcccacctatgagtgagaacatgtggagtttgattttctgtccttggaatagtttgctcagaattatggtttccagcttcatccacgtccctacaaaggacatgaactcatccttttttatggctgcatagtattcaatggtgtatatgtgccacattttcttaatccagtctatcattgatggacatttgggttggttccaagtctttgctattgtgaatagcgccgcaataaacatacatgtgcgtgtgtctttatagtagcatgatttataatcctttgggtatatacccagtaatgggattgctgggtcaaatggtatttctagttctagatccttgaggaatcaccacactgttttccacaatggttgaactagtttatagtcccaccaacagtgtaaaagcgttcctatttctccacatcctctccagcacctgttgtttcctgactttttaatgatcgccattgtagctggtttgagatggtatctcattgtggttttgatttgcatttctctgatgaccagtgatgatagcatcttttcatgtgtctgttggctgcataaatgtcttcttttgaaaagtatctcttcatatcctttgcccactttttgatggcgttgtttgatttttttttgtaaatttgtttaagttctttgtagattctggatattagccctttctcagatgagtagatkgcaaaaattttctcccattcygtaggttgcctgttygctctgatggccattttttttttttttttgctgtgcagaagctctttagtttaattagatcccatttgtctattttggcttttgttgccattgcttttggtgttttagtcatgaagtccttgcccatgcctatgtcctgaatggtattgtctggatttttttctatggtttttctggttttaggtctaacatttaagtctttactccatcttgaattaatttttgtataaggtgtaagggagggatccagtttcagctttctacatatggctagctggttttcccagcaccatttattaaatagggaatcctttccccatttcttgtttttgtcaggtttgtcaaagatcagatggttgtagatgtgtggtgttatttctgaggcctctgttctgttccattggtctatatctctgttttggtaccagtaccatgctgttttggttactgtagcyttgtagcatagtttgaagtcaggtagcgtgatgcctccagctttgttcttttgcttaggattgtcttgggaatgcgggctcttttttggttccatatgaattttaaagtagttttttccagttctgtgaagaaagtcattagtagcttgatggggagatgaaggagtttctataaaaacctctgcatgcccgaggactatacgggaggcctgtgtggatcacacctcctgtgtcctcggaagggatggctgcagacttcactcttgggtggaagaaaccccgctttgctgactcccccaggtgcaggttctgagctcacaggggtggtctgaacagctgggggcacccagcacccctacccccacccaccagggtgaggagctccttgtactgtggatgggggaccgggataggcccacctgtccctccagggctgcacttgctccatctgacattgaacctgggcctgtgtgcagtaaagaagggaggctgtgtgacccaagcaagactgcatcgcctcctgtaggcctggggctgtgggcggcagggcaaatccactgtgcgtggggctttctgtgcacatagccatcctttgtttagctagcacctctggctggttttctgttacaacagcagagttgagtccttgcagtttcgatagaaatcctacgtctggctaggcctgaaatattgactctctgactctttgcagaaaacacttgccaacacctgtgaatgttggcactggaaggaaaagggggtccatttcaagacatggggggctgaagccagacaactgccaggtccccgggcccctccagggacctgacagcccctccttgcccagcacctcgctgtccctgtctcatgcccatgactgcagctgtgactttctcctcctgctccctgagcctcagatgacacagagtccagagaggctgagactgacccgaggtgccacagcagatgaaagggggatttgaggctgggacccagggtcccacctgacagcctttccctgcccagcacctcgctgtccctgtctcatgcccatgactgcagctgtgactttctcctcctgctccctgagcctcagaagacacagagtccagagaggctgagactggcccgaggtgccacagcagatgaaagggggatttgaggctgggacccagggtcccacctgacagcccctccctgcccagcacctcactgtccctgtctcatgccgstggctgcagctgtgactttctcctcctgctccctgagcctcagatgacgcagagtccagagaggctgagaggctagcccgaggctccacagcagatgaaaggtggatttgaggctggaacccagggtccctggcagccaggcagaacaggccgcagaccttctcagcagctcacctacagagcgcccactctgagcctggtcctgttctcagcgcttcacgtggactaccttaccccatcctcatctgggagctgcagagtgcaattgcccttctgaagttggggaaaccgaggcacagagaggttcagaaacttgcccaaagacacatagctagcaagcggcagagctggagccacccccagatggtcagggggcarggattgcactctggagccacggagggcgtatggaagactctggagcccaactgagtcccaggcctggtctgacccttctctccttgtccctgagcaattggcttctcctcgccgagcctctgtttccaatgtagaaggggcacacctcactcatggaaggcagaggggattggatgagctacagatgcgaagctagtcccrcccagccagccggccgcacgtgttagctgcgacaggtacyaggtgcttggctggggtttgggggatataaacagtagaacaactttgcctagtcaggtgaatgacacaagcaggtcagccagtatttgcaacctaaaaagatctcgctcatgggccttggagcaggtgcagtggagaccagaggaagcagtgtaggaacaagttcttcctgatggacttcactggacccgcagcaygtgtgacrtgcttcccagaccacagtgctctttttttttttttttttttttccaggcagagtctcactctgtcacccaggccggaatacgtggcacgatctcagctcactgcaacctctgcctcccaggttcaagtgattctcctgcctcagcctcctgagtagctgggattacaggtgcccactaccacgcccagctaatttttttttgtatttttagtagagtcagggtttcatcatgttggctaggctggtctcaaactcctgacctcaagtgatcctcctgcctcagcctcccaaagtgctgggattacaggcgtgaaccaccatgcccggccagcacagcactcttgcgtttgtaccgcagcagcaatactttcaacacgctgcagggggacggctcctttgaatggcctttgtcagtgacgatccactcctaaaaaacccctcacaccctggggcctccttgaccatgcctcttttttttttttttttgtgctttctgkggctttcttttttcttttttttattatactttaagttttagggtacatgtgcacattgtacaggttagttacatatgtatacatgtgccatgctggtgtgctgcacccactaactcgtcatctagcattaggtctatctcccaatgctatccctccccgggagttgaacaatgagatcacatggacacaggaaggggaatatcacactctggggactgttgtgaccatgcctcttatctcaactttaacagctgcttccccttgagatggtttgcaacctcctgccccctgagccctgatcagaggggaccacaatgggctgattcattcacattcattcagtcagcaactacttactaaacacctactgtgtgccaggcactgaaggtgcagcagcaatcctgacaggcaggtccctgccctsgctggggacagatagcaacaaacaggccaataatgtaataagcagtgattaatgcttgcaaaaagagaaagcagaaaatctataattaaacaaggtaaaataaatgtttattttgaggggcagaggagatttacaggaggttactttgttaaggagcattgaggcagggatctgaagggcatgagtgtgagggccctgcagtgggaatgtgcccaacacgacctgggttgattggacacctcctccgtgcgcacaacctgcagcttcttctaaggggcaatggggcctggctgtggggggctgtgggcggaggaacccaagctggattcgcaatcaygcacccgggctcaggtatcagctctgctgctcactgactgtggaaccctctgagcctgtctctggacctaaggaaagcaaagtggagcaccagctgccttctgcaccctgttagtgtgtgttggggtgggggtggggggcaaatgacygtgaacagagtttctaaattggargggctgttcccagggaaaggttcagagtcgtctccccatctaatatttgcccacggatcagtcatgcagcgaacatgtcccaggcaccagctctgggcaggtcgtgtgtgaggggtgtgggggcacggaggtgaatcaggaggtggagctggccctggagccgactgcagggcgggacagatggtcacatacacagcacaatggtcctgaggatgagcagacgggtaaggccttgccttggtgttcaggcagagactaggaatgctccggcaacttcgaactgctggatatggctggcgggtatggagggagaagcggccaaggtgagactgaggaagagcaggcaggggcagcacgctgggcaagtccgacctcctcggtggggtgggagaggccaacacgcagggtggtggggagtcccgcagctgtttgaggaagttcactctagctgagcttgggcacggacccccatggggacagagatgctgatggcctgggctgaggggcagagcgcaaggggttcagatggaggaaccccaggacctgaaggctggctggacaagggaaggkcttagaatgaggaagaagccccctgatgcctggcttggtgccccagggctggggatgaggaaatgggagttctagagaaggagcggtgtgggggctgttggtgtggggggctgtcggtgtgggggggctgtcggtgttgggggctgtcggtgttgggggctgtcggtgtgggggggctgtcggtgtgggggggctgtcggtgttgggggctgtcggtgttgggggctgtcggtgttgggggctgtcggtgtggggggctgttggtgtgtggggctgtcggtgtggggggctgtcggtgtggggggttgttggtgtgggggggctgttgggtgttgggggctgtcgggtgttgggggctgttggtgtgggggggctgtcggtgtggagggctgtcggtgtgggggggctgtcagtgtgggggctgttggttggggggctgtcagtgttggggggctgtcggtgttggggtgctgtcagtatgggaaggctgttgggtgttgggggctgtcggtgtggggggactgtcggtgttggggggctgtcggtggctgcccatagcactggcattgcgtctgctcttatttcccaactcccaggaagcaccttgggtgggttagtgtcctgtggctgctgtggcaaattgccataaccttcatggcttcaaaatacagatatattctcaccgtcctgggggccacaagttctcaatccaggtgttggcagggccgtgctctctctgaaggttctaggggaggaggcttccttgtctcctccagctccggggctccagatgttcctgtagccatcgctcccatctctgcctttgtctccacatggccttctcctctggtgtctcctcttctgtctcttagaatgtcacttgtcattgcatttagggcccacctgggtaatccagggtgatctcatctcaagatctttaactacatctgcaaagacccttttcccaaatgagatcacactccacagtctctggggatcaggatgttatggacacatgctatgctgatgtatttgtgggggccattattcaacccaccgcagtggagaaaaatagtctgtgctcagttgaggcatatgggattgaagagcgattttaccttctctccttttcatcctctctgcataacttgctcctctctctggaattcctacctgtgtctgacaaacttttcttgcagggaaaatgactcttagatgctagagtgtgattggaagggaaacaaatcccaccagacagttggagtggaattagatgggaaaacagaagatgaataattcaagcagctttgycaggggaaaggggactcttaaatgagcctaattatgcttgttcccaagggaggccagtcctgaaatgaaccttgtgaagcagtttttcaagcaggatttaggcgggtatcatgaagctggggtggggccacctgcggttagtcctggaaaggaaagggcccaggccctcattttgcagatggggaaagcaaggcttgcagaatggaaatgatgttccagtaacagccaagaccagacgcccagccgggggcccccagtgacagccaagaccagacgcccagccgggggccctcagcttctgacctggtgctggtcctgcctaagttaaagccaccgagtgtggtcactgggccaaatgcttcaaagtctacacacgggggagggcatggtgtggggcagaaagctgtgttcacggtggctgagtttgggcataattctcgtgctccggaggcttctcccacagctacttcccttgtcaggagtccatcttcagggccctgtgttatgatggattgagggagcaccaacaggggccaccccacttggtaattaattccttttgtaaagggctgggctgcaggcccgggtaggtcctatggccacctgagccaaggtcttggagaggcggtcgcacggaccaggtgaccatggacccagcccggtgcccacaccgtgaagggtgctgtgctgcccagaggttctgggcacggctctgggccctgggattcagaggctcgggactgcttgcctccccacggagatcttaccgtggggaccctgttgtggagggcctgccgcattggccgtgacagtgatttttctccttctgcagggtgatgtggatgcagggcctctgtgtctcacatggttgtttcacagcagccaccgtatccgaagacagagagaaagagcaggagagattcccctgtgatggctcccccatgggtcctgacccaggtttgggagactttatctccccaaagccaggccctcgatccctttgcctttggggactctgtgtccccagcctatacatggggtgctcgattgagtgtccgtgcccctcagccggccctgggttgccgtggctcgggtgtgtttgccacggggctacagacctaatggagccctgcatacttttattaattaattaattwatttatttatttatttttgagatggagtcttgctctgtcacccagtctggagtgcagtggcgcgatctcagctcactgcaacctctgcctccccagtcaagcgattctcctgcctcagcctcccaagtagctgggatttcaggcatgtgccaccacgcctggctaatttttttttattttttatttttagtagagacggggttttggtatgttggtcaggctggtctcgaactcctgagctcaggtgacctgctcgccttgacctcccaaagtgctgggattacaggtgtgagctatggtgcctggcctcctacatactttgaaaagttctgaaacatccccaggtgggaaaggaaagagcgtttgggtggacactgaacctgtcagggggctcacgttttgcagtggtagcaaacaacctgaaggtctccaaggcctcaaacacccacttcacacctcccactcacgctgcaagtgtggccgtcacaggctggctttggtgcgatctcattgcggagggaacagtgtcacagcagaccacgtgctggctctcaaaacttcagcctggaggtgacatgcctcacttgtctattcattggcagaagcaaccagcctctggccactctgggttctgaaaggccgaaggagaggtctcccctgggagagaacctggaatgttcagagaaccccctgggtgtcagcatttgacttcatcccaccgagtcctcctgcacccactgcgccccatgagttataaccccaggaaatacaacgagaatgagcgtcctgatgacgcaaacagaactcctgtgggactcacgttcctgggcgcttctgttgccaccaagcctcctgtggcttttgtgtgtctcagggtgtgcagagagaatgtagcccctctctgccctgcctctctactgcacattatccatgggccgtcgcactaatgtgcgtgacatttcatcagtggccgcactttttctctggatcccacttcagtgaagttcagtaaggacctgagagctgctccgagcgggcagcgtgtcctggaaagccatgggaggcattcggcctgggagggctgggctgccaggtggaygctggagaaatcagcatggcaggaggagggctcttttcttgcttggccttcagtatcatttttcattatttaatcgctgcttcttttcatactggaaaactgtagtttcctgggaaaccagccaggcagtgatgccttaactcatttttccctctctttctatttttatgtgattctcagtttgtggttaatgacgtgcttccgggaagcaagatttgagcacgagcacagagacccttttaggtgctttctgactgcacagatcagccatttttttccctggcattttataaaccctcgggtttagagaggtcagaaaatactgcttgcttgctttttttttgacagagtcttgccctgtcaccaggctggaatataatggtgcgatctcggctaactgcaacatccacctcccaggttcacgtgattcccctgcctcagcctcctgagtagctgggactacagacatacgccactactaattttttttttagtagagatggggttttgcaatgttggtcaggcttgtctccaactaatttctttttgtattttagtagagacggggttttactgtgttggccagaatggtctcgatctcctgacctcgtgatccgcccgcctcggcctcccaaagtgctgggattacaaatactgctttcttactgagagaggcagcagcttgggtggaggaagagggagggcagatggatttcagagtttcagtcagtattttccagatagaaaataataaaaatggaaactgacattcattgagctctgcaacgcatcaggcagtgtgtgaagggctttgcctctgatgatcttcacagcgaagtgataaggctatactgctgactcattttacagatgaggaagctgaggcatggatagctgggaactcactcagggtcacacagccaggaggtgacagagctgggattcaaaccccagaccttccaactccagggctcacatgcacctgaagagtcagagggaacagaccgtgcaaagccccatgcagggccggggagaccggagcctgaggtcattgctgtgagaggggagagggcctttctgtcagggtgatgggtgggatctgaagctggaaagccggagagaagctcgggggcgccagtccttgcatgctgcaagagattctgatctgctgctgggcagcagggaagggataggaaaagagcaggtgctggggccggggaggttgtgaggctgaatccagccttaccactcacacctgggccaccscggacgagttgctcatcttctctgtgctctagtgtaacagtcagggatactgcctttgcaagcagcaaagttcttgactctaaacaaaaaatggacatttattggctcccacatttagcagtctggggggaatggcttcaggtgcagcttgatccaggattccaatggcatcaccagatctttctctgcactctttccactgtctgccccaccctcaagctccagggtttctccttgtcctggcagcagatagaagctccttctttctacaccacccagcacagcaggggtgaccaagctgcatcccagccttttcagtattccaagtcctggggtctggagagcacagatcagagccgaggtggggccgacccagaaacccagaagaacctttgcccaaaggagaatctccatactgtggtcagaagaaggggagcaggtgccgggggcaggaaggggagctcccagatgcccacacactcaattccagacacaatttgaaaagggaccgggaagacttgaaatcattcaccaatagcatccactgcccagcatgcagtcggcacaatataaatgctctttttcttctgcttggcaaccaacaggggaaggaaggcagaggagaggggctccacaggtcagtgctatgtgtggctggaactgatgcaccctcactggggtggggtgcaggtgaggggggccgcaggtcaggagggaagtggtgggtccagcttcatgggaacaggggacaggcacctagaaggggtagccagcaggcagttcaccatgcaggtctgcagctcagggggacgcattttgagggtctcaggaacagagaggcagctcagacgcgagggtggacggttttgcctcgggagaggtgtcagaaacctccgggaaggcggagcattgagggcgcccttcactgccccttccttgaccgcactgcccccagacatcgtggacatcaagccggccaacatggaggaccttacggaggtgatcacagcatctgagttccatccgcaccactgcaacctcttcgtctacagcagcagcaagggctccctgcggctctgcgacatgcgggcagctgccctgtgtgacaagcattccaagcgtaagtgccggtgcctgggggtggggggctgtgcattgggcaggcgggcgggtgggatgtcctgtcctggtgcagctgctgcaggggtggtgggtgtgggatgagcatgtcctggactggccaaggtgggtgggcccattgctgcttcagcgctggctggtcggggagcctggtcttgccacctgctgccccccagagtccctgcacagccaggaacagcccagcttttagggttcagggctctagggcgagggtcagggcatccagaaggtaaggaggcaccaaacttaaatgtcacctcctgtaggaaagcttcccggcctcctactttagatctggatcctcctctgtggccctgcagcccccaaagcttccctcttccaaaactagccacacccagcaaacttgctgtgggctgcccatcttctccggctccttggagcagggtctgtaacatgtcccctcatcctagaacccaccacaggcctgctgtgggggtcccacaggggtatccgtggaggtctggggctgaacgagttccaggggacattttgtgacacagcagcccccagcataacagctcacactgaacactcactctgagcccagcccttaccaagggctttacctgtgaactcatcgaatcttcacacaagycccaggagatgctgttcagaagaggaaacagaagctccagttattggcccaaggtcacccaaattcaatcgtggcagagctgggctgcctggcactgggttgtggccatgggctgcacactgccacagccatcccagaggcccctgaaggcgagggatcaggccacggcatcctccttcccagacagccctgcagggctagcaaggggccaggcaggaggtggggtgtcccccaggcagagggcagggactttgcttatctggttcccctcactgtctgtccccagcacctaccacagtgtctggaaataaacacttgttgaataaaccccagaggaccctgactgaagcctgggtgccggcggcagagggctgtttgggagcgatggggccacactgttcccttagggtgtctggttttgctgggcagtcagagacagggtgcacaccagccccaggactcaggctcagggcccaccaaaacctccagcttctgcctccttccttggccaagttctggcccccacatccaccccctcatctcctctgggtttgtccacgctccgtgtgtcacgctcagccatccaggcattcagtaggcgcctattcctggcatgggcgtgcagcagaggcccaccgtcgggagctggcgtctgcgggggagacagacagtgaacacacacctgacgcatgtcagggcatggtgagcaatggcaccaacacccgcaaagtcaggtacagggacagagggggtcagggagggcctccctgaagagaccacagtggaacggacaccctgagggggtgggtggtgccgatctctggggaagaatgttcgagaaggagggcactgcagtggccgtgactccacacattgcctgtaggtcaagggagggactgggttttgttctggctgagctgagaatgagaagctgtgggttgtcacgagattgggacttgaggaggaagaggagacgccgcagagggtccccgggggagcaggcgtcagaggtcgctgcagggtctgcaggaagaaatggtgaccccactgagggggttgttgggaggtggggcagggctcacctggctgccccctctggatgttgcttggaggtcgagctttgccttgtggggcgtgactctgtggttggtttgagctgtgggtgaaggtggggccgtggcctggaacaacagggggtgccagggaccagcaggcaggtttcagacccgcgagcctgaggcccgtattgggttccaaggaaatgggtcgagtaggcagccagatatccaggcagtaatgccacctggagataagtgtggagttagtggccgtggactgatgggaggctggagaccagctgagattcccggggtgcagggggctcggggctgcgtcctgtgcgccacaacaaaggaccacacacttggtggctgaaaacagggcatatgtatagtctcagtccgcagtcccacagccagctcactggccataatgaaggtgccacgggctggtaccttcgggaggctctggggagcaccgttttccctgcctcttctggcttctagaggcgctgcgttccctggcacgtggcccctcccccatcctcccagcccacagcggccaagcctctctcacgtctctgaccctcctgtctgtctttcgcgtataaaggcccttgtgatcgccttgttcctgccacccctaatgatccaggatgacttcctcatctcaaggttggctgagttgcgtccttgatttcatctttggccttattttgactttgccgtgtagcataacatagtcacaggtgctagggatcaggacgcagccgtctctgggggccgttccaccgcctactacaggacactgcccccccacytacgcctcccgcccattcactcaggccacatgtgcctccagctgtgcctgtgtacagccaggtctgggtccgaatggaatgggagaatattggggaagagagggggttcttcctgctcctggtccgctgctgaccccgtgtgagccctgtgggaaggaggatggggcttcattggcaccctgttgtttataggggtggaaatccagaaacatcctcaatatcccaatcttaaatgctaagattattcaactcttctgaaatgagtgaggcagctttttgtttctttttctggaaccgttggtgtaatatatctgctccttgaagtattaggaaaacttgtgtgcaaatctattcggcgtccttttgagggagagaaggaaaattttaagcaaccagtttaaaatgccgagaaaatgatgtcgacagtgatgacawccatgtactagaatattgttcggtcatgtcagctattgttttagaagaatttttaatgccacagggaagtgattatgttgaaagatttaggggataacaaaataaggctatgaccaccagaaaagtggaaacagagaaaactctggaaagaaatacactaagttgtccctgagtggtgagctataagaaactgatggaatattttctttttatttttctgtgtatttttactttcatgatggatttgaactttgaatcagaaaacacatgtgtgtgcaggaagggtggaatttagagagcacagagacgggcataggacagttttgtgcacccctcaatgtttgtgtgacatttttcagtgggctagagggggcagtcagaccccctttggctcccgaagcctgtgctatccggtttcccagggcagaagcagcggtcacatataccttgcacatttcgtgagtccaagcacagacacatccatttcagccacgtaatttcatatgcctgatgatgtatgagccttgtgtgaatcagccaatgaactcaacagtgcgagaaatatgagtgttttcgatgactcaattcaatttcattcttcacccccagctcccagggctgcagtgaacgttaacttttagggcctcggcagattccactcctctccggattgcactgaggttccagaaggctctggcaggccgaggtgcggagagagggacatggtgtcttccaggccactgaggacttttgattgtgcctgggcgaccttggggccaggtccttgctgacaaatccccaagggcctgttggctgtgctcagtgactcacctgggaggttggcaacatgctgacctctggcggctcttgcccgcaccagtgatcccaagtctgtagacagggtggggctgcctgtgatgtactaaggttttatgtatgctttttgcacacacagtcataggtgaagttggtttataattttcttttcttatactctctttgcccaattttaagattattcaactctcctaaaatgaactgggcagctttttctttctttttctggagcagttgatgtaatatatctgctccttgaaatcttaggaaaacttgtgtgcaaatctatttggtgtccttttgagggagagaagaatttttttctttttttttagacagaatttggctccatcaccctgacacgatcttggctcactgcagcctccacctcctgggttcaagggattctctcacctcagcctctggagtagctgggattacaggtgtgtgccaccatgcctggctaattttttttgtatttttagtagagacagggttttgctgtgttggccaggctggtctcgaactcctggcctccagtgctgggattataggcatgagccaccataccaggccaagagaagaaaaattttaaacaaccagcttaatttcttttttgattattgatttatgcaaattttatttaaaatttttctagaatatttttcattatcaaactcaatatcctgtacggaaactttctctttcgtgccagcaaaaagattgygcagcagtttttagcatgcttttacagcttccatttctcctcatttaatttgccrcacattggggcgagtggctgaagtgtctgtccttctgcatgccttgtccgggctgtgtttttgctctgtggctctcatgggaaatcaagcacgcagccgctttccaattagcaggtggcggctgtttttaatctgaacacaaatggctgttatttgagctaattttttaaaagggatttggggattaggattagttcttcacctcccacttccatccatgtatccaattactgctcaaaactcagggagtggctgatagtgacaccccagagatgtgctcacagcatcattttcctaacagaatcagaccgcgaatgaagagcgtcctggatgcaggaaggtgagcatttctgccattggacagatgaggagaccgagggtccgagaagctctgtgacttccctggacccctcctctatcagggcagagctgggggcacacaggccactctgttccctctgcagcttcccacctttctccgaagcactggaaatccgcgtcttgtgactgcttggcagtgtgacagggtaaccgtggaaacaaccgtacatgagtcctcaaaatagacagttacttctgcttatgacagcacagagcctgcggaaagaaagggccgtgcccggaacactgggatttcttagaattgggggtgatgatggctgagaccctgatttcttagaatcggggccgatgatggccaagacccttcataggcccccaacgacgtgcctggcccggtgttgggygaaataataaccgcagctcattctttgcacacytagtgcaaacacatgctgttttcagtttatatctcattaaatactcagcacctatgatgggtgtgttatagtattcatcctacagatgaggaagttgaatacacttgaccctggaatgatgtgggagttaggggttcagacagtgcctgaatgcagttgaaagtacatgcttaacttttgactccctcaaaacttcactcctaatagtcggctgttggtggggagcattaccagtaacatcaacagctgatgaacatttgaagagactgatgtctacgtggattttatgcatttgtgacatacctaactttttcttttcttatatatatatgtatgtatatatatgtatgtgtgtgtgtgtgtgtgtgtgtgtgtgtgtgtgtgtgtatcgtggcagatctccaaaatgttttcagtatatttactgggaaaatcgcacatcaggggacctgcaggttcaagcctgtgttgtgtgagggtcaaggggcaactgtatacgcacttctcattgctgcgggaacaattgccatgagcttagtggctcaaaacaacacaaaagactgttgtacattctggaactcgggctaaaatgaaggcgtcagctggcctgtgttatctctggaggctgcagggtggggctgttttctgatcttttccagctactagaggcttctagaggctgcctgcactcctcagctcatcattccaacctctgcttccatcatcccatctctttcttccatctttgaccttccttcttcctcctatacagacccttgtgatgacattgggcccatccagattatccagggtcacctccgtacctcaaggtccttcacttaatgacatctgcaaagccccttttgccatgtgagataacaggtgcacagattctagggtggaggatgtagatagacgcctttaggggtcattgttctctgctacattgaagcacagagagattaagacatttgcccaaggtcacacagctaagtagagccaagatagagcctcagagagtctcatgccttcaacctgcactctttttccctttctcatcacagaagccttgagaactaaaactcttacaggaattgtgggtgagctgggttttttttttttttttttttgaaatggagtctcattctattgcccaggctggagtgcaatggcatgatcttggctcactgcaacctccacctcctgggttcaagcaattctcctgcctcagcctcctcagtagatgggattgcaggtgccggccaccacacccgactttttgtatttttagtagagacaaggttttgccatgttggccaggctggtctcaaactcctgacgtcaggtgatctgtccacttcggcctcccaaagtgctgggattacaggcgtgagccaccgccccccacctgagtgggttcatttaaaagggctgtgtgggctcaactcccagggctcactctagtaatggatctgctgcagaaagaccagcctcagcccagaccctgcagctctccaggtgcaggaccagggcaaagctccccaacagtgggaacagcccatgtgagggccctgtggctggatacrgaggctggagagaggaggtgaggtcagagaggtgtgtggctggaggaggcctcacaggccagagcaagagcttcgggtttcctctgaaagggacaggaaccacaaggccgtctgagtagggagtgggccagcctggccatgtgttcacaggatccctctggctgcccagtggggaataagctgaggggtgaggtagaagtgggggctggctgggggctagcgtgttcacgcaggtgagagacgctggtgckcagagtgagtggccggtgcaggtggggaaggtggtgggccctgccccccatggcaggtggggcctgctggatttgctgctggattggatggagagggagggagggtcggggatggcttcaggctctgtacagagaccaggctcccrtctgtgtggagctttgtggagggaccacaggaaggggactagtaaataagtaggtgcattggagtgggaaggtttccatgaagggcatcaggagccctctgatgcattgcacctcaggggtcaggagaggtgtccctggatgagaaagagcctgggaatgggggcgggggtgccccaccccacagtagtgtctgagaggaacctggctgacgtcaggacccgtgtggctggaacaggtggaggggtgggctcttgtgtgcaaagatgggttaaggggagagcgtgccgggcctgggggccacagctgggcttgagttttttgtttgatggggctcgatcacatggtgctgggcagggagtgacaactgtcatctcttcatcagtgagcattcattgtgcccacctgtgccattgtaggaactccctgctccctccccactgtgtacagcctcagggatagggaaagaggccgmacaggaggcccctccccaaacagtggcatcacctggaacccaggagcaagccagtgtccaggggtgctcggggatccataacccccatcgtccttcttctgcttctcggaccctccaagctcctcctggagcgcggcctgaggtgaggccagctggcccaggccactccaccctcgtggatggccttgtatcccatcagatcacaggagggacccgtggccagggtagccaggggcgatcactgcccaggaccccataggcccctccccctccaggccacctcctcccatgtttcccacctccacccacctgcaggtccctcccaccctcatctgtttctctggaggcctcactgaactgcacttgtccctgaatgcatggctcaagcccatgcatttctactgtgtgaacccaatcggcctccaccccagccccagaggagtgtcgtccacacactgacaacgatgggggtggggcacagcaggtgctaccaagagggccacagagcaagtgccacgggcacacaggggccacccccaggctggctgaggcttctctgccaggcctggaaactgcagtggaaccacatcaggttggggaagaaagatgtcagtgaggggctggagcagaaacggcaggcagctgcacaagcttctctctgctcagggagcagggcggggccatgaggcagggtctgtgctaggcaggggcgccaagatgatcagtgactaatgaccaaggcaggacccctggcccaagggagcttacagccccatgaggggaccctgccctcctgccagtgccacaggagaaggtacccagcggcttgggggcagcagagggtaagcacaggatttctttagagagcatgtgaacaatatgcacagaaagcagggtgtgagcctggggttctagaggatgtataggagttggtaagaaagaccagctaaaaatgggaaagggatctcagggagagaaaatgatgtgaaaaataactccaggaatccctccgtagttttattgagcagctactgcaagccccacactgggccatcgcctccaggcatgacctctgaagatcccatcgtgctccttctccagatgagggaagctgggctcagagaggaccaggcccttgcctgaggtcacacagagcacgatgcattctgctctctgcccagcacatggcggggcaggggctacgggaggcagggggagatgcctagggctcaacattgaggagacacccacccccagagcctttgagtggatgcagtgccctaggggcccagcaggaagggggctggagtgtgcggcagaggggaacttgcgtgtgtgaggcagcagcagcaggctggttgggacccattgagaaggagctggtcagctacaggtaggagcctaaaccttgatcctgtgggcactggggagccaaggagggcttcaagcagaaggaggtgccgtcggctctgtgtgaggctggaaaggaaggtgggcacctgctctcaggcttcacctcctgtttcctttgattcacaggtccgtcagagccgccccacaccttggttgggctccccaggtcccctccaccttggcctgagccagggatgggggtggggaaggctctctgtggccacaacaccgtgcaacacccagggaggaagaggatgtggttgtcagggaaccggctcgagccatgagagccctaattatgcaaaatcattaaaaagaaacaggatggagatttcggctgattgagagctctccaacttttaaataattagggtgtgggggagtgggtggagatgggactgggcccatcacaagtgatgggggctttgagacatgtttctttaaacccatggcaggaataattactgtgaaatgtccttagcgattcagtcaattagaggggagaccccttatctcttgttagcgctctgaargtggtgcagcggggtgtgtgtgtgtgtatgtgtgtgtgtttgcgtgcgtactcgggggcagcgattgatatggaatagtagattccactatcttttggaaaaaaatctattgtatcaaaaatttcatagaaacgtctaaaaagaaaaagaggaacttttaggaatggtttttcaggcttattaatatcccttccgatctatcgtttgcattcctgttccttgtgtccttaaaaaccctcagaaatgcccgagtacagccagcagtggggygacaagggccagcgccgtttggctttgtttccactatcgattcaattgttctctcagcctttgatctttgcggtttttcctgctggaggctggtaggatacttggccactcgttctgccctgtgacacccagcaccggtgcmccctgtgattctggctgaatccacccgcaagtcctgctgggaacctagaccagccctcaaggtctgggggagtctggtctgagagacccctgagcaggcgagggggtactaaggccactccggaagtcagcctgtgagaggccgccctggctcagttttggactcacctccgcctcacctccaagtgacagaaagcctagttcaggccagacagggttcccgccactcacctgggcaggtgctgggggccaccaggtcccgctgagattctcttccttgtttccatccatttagccaccgggggtccctcttctctcaagccctctccctgcttctcccaaatatgagtctctacccactgctaatggaaaggcagcacaacatcacccctttagggaatcaagcgttcgaagtgattttctttacggtaggcatcagagagaaaagggaactgtggttgatccttctttggcttaacaaagaaaaactacaaatatatatatatatatatatatatatatatatatatatatatatatatacacacacacatacagaaacaaagatgccaatttaattattattatcggggcacaaaacattatcatgtgagatgaccaattagaactcagaggttcagaagctcaaggtgnnnnnnnnnnnnnnnnnnnngagagagaaagagaaggagagagacgggaagaaagaagaaaggagagagaatagagagggaagaaggaagagggggggatagtggagtaggggggaggggaagagagagagaagaagggagaggagagaaaagaagagaggagagcgaggaagaggagaaagagaaagagagaggagggaaggaaggaggagaaagaagaggaaagggggagagaggagaagagaaagaagagaagagaggaagaggaggagaaagggaaagggaaaagaaagagagagagaaaagaaagaagagaagaagagaagaaagagaaaggagagagggagggaggggagaaagagaggagaaggaggaggaaaagaggaggaaggaagaagggagggggggggggggaggaagagagggaggaaggaagaaggaaaggggagagagaagatgggaggagggggaaaaaggaagaggatagaaaaaaaaaaaaaaaagggggggagagaggaagggagtgtgtgaagagggagaggagaagaagggggaagaggaaaggaaatgaggaagggaagaagaagagaaaagaggagaggagagaggggggaggaagaaggaaaagagaggagggaggagagagagagagagagggagaggaggaagagggagagagaggaggagaaaaaagaaaaaaaagggaggaaaggagggaggagaaaaaaggagttcgttaagaagggagggagggagggaagtaagtcagtagggctgcagcactcatcgtgcactgggctcactctgtacagcatctttgctgcctgcggccctgcctgtacccagggtggtgccaggcctggctgcaaccccctcctcctgccccttcctgaaaagcgcccttggctcctgttgtagggaggagcaaggccagggctcagggaggtgaaggcgttcaaggccacacgaggggctcggggattgagaccctggcagcctgttctctcccagctccctctgcgagcggcctcacccttccttcccatggtgctgattttctttctggtcctcccttcaatgtgcccttgtggaaagaggaaagctcgggccactgagaagggcgcccctgtgaacgatggagggagattgaggtcgcaggcaggcctggggactgggggcgtgtggaggggtgggttgggctcctggaaagggaggcgcctactgtcagttttgagtttcgttaaacacctgccagcctgatagcattctaattccaaaatatgacaccacytattagtggataaactaggctccctccctccttcctgatcttgacgccaggactggaaggagcgaccacctgccctcaggatacccggtgcagtgccatggctttgagggcagaggtgtggggttgaaggctgccactgctcaccagaggctgtggagaggctaaggacagggatatagatctcctgagcttcaggggtctgcttcagagacaggtgtttggaggccttgctctcaagagaggtgggggggaccttcctcctgctgcctgctctgatytggggggataccagaggcatgaacataaacgtgggagccttttcctgccctgtaagcagcttccctccccctcctctcacctcccctcacctccctgcatgcagtggcctgggatcaggatggtgacacctgggctctgcagccctggcccacygggtgctggaacttccttcctccgtcgggaggggactccagcctcctgcctgcccctccctacctccttgactcagatttcatcctccctgtctctgaaccctcagtggctcccgtttccctaatggtgacttcctcacccctctccgtggcccatgagatcctgcgtgggtggccccttgcgtccctgttccccctgctcactcctttctctgcctgcacggcccttggcgtgtccctgcctcagggcccttgcgtgtgccgtcccttctgcccagcacacccctctccaggcatcgccaccaatctctccccaacttcactcagaccttggtcaaacagcacctcccacggaggccctgttcacctaaactaccagcccccagcacctatctgcctgctggctcttcctccccagcacttgctgctccctggcggtggagggcgccacttagttttattgtctgtatctgcaaggagaatgttggctgcacaggaacagtggctttatgctggtcactgcatcatcccagggcctggcacagagtaggtgctgtttgcattggttgactgagtgaataaatgaatgaatgaatgaatgagtccatcagggcatccagtgggccctgcagaggggagctggacaggagttgtatttctggagaggcagtggccaggtacagtgtccaccttggacaggagggagaatggggtgctgccatttcccatgaggggataaggggctgggacagacctgggaggcaggacacgagcccttgtggctgagaggggccagcagggaggggcctctcgggagcctcagggtgctgtgatcagctctgcttccctgtttctggggtagagaccagagcaggccagcaggcaaggctgccactcagccggtttccatggggacagctggacaggttgtcatakgtttaggtatttccagattggctggtgaatggctgtcaactccaccaccctgttctcttcccatcgttccctgggtctctctgtggcccaggtcctagggagttagtgcctggcccaacaggggtcctagtccccacgctacttcagccccagggtcactgctaccagtgagacagataccagcagaaatgagcttagagaccttgtcccactttgggaacttctgcagctcaggaaggccaggttatgggggcagtggggaggggacactgtctggggagtcctcattgcccactctgtcccagtctataattgtccaggtgggcagcaaaccrttgcctttagggaccagataagcaacttcctgtgcagagcaggtgctccaagaaaaaaggagatggtcagtggatggcatacaggagactgtaccaactctgtggcagtcagatttgattttgttacaaaccccatggcaatgaaacaaaacccacctrtragtagggctcagccatgcctgcccaggacaccatgarcagagataactactggcccaaggtcccagggccagttagtgccagagccacaagcagtgcccagtctggtagaggacattgtccagcacatttgagaatgtcaggacacctttgcaatctggcattcagcatcaccagtagggggcagtagagggcagcacatcaagtatagctttggcttcaaatcccgactctaccaccttcttccagcactgactccccaggcatgggttttagccagctgctcctccattttcttggctatgaatggggatagtaatggctatttctgcacagcacagaatcttaccaggcttgttccctggtaagtgtttagttctaggtttgaggaatgaatgaatgactgaataaacagagcatgggcccaggtgcaaaacagagtcatccgtcgtgccaaccccatgggcgggagcagygcagtgacggccattgcttctctgtctccacagtctttgaagagcctgaggaccccagtaaccgctcattcttctcggaaatcatctcctccgtgtccgacgtgaagttcagccacagcggccgctacatgctcacccgggactaccttacagtcaaggtctgggacctgaacatggaggcaagacccatagagacctaccaggtgggcaccacagcaggagacccccaatcccgggtcttttttccctatgctgagatccccatggagggggccttcctagccrggcrtggctttcatatgcccngtatgtaggtgaagacacggaggctgaagaaatccagcaactcatccccacacstagcttggcagagggcaggagtgctcagtcttgcctcacagggagctttggatgtccctgagcaaggcctgcagtccagggcccaggggcctcaattccagggaggaaagagatgtgggaacagagatgagcgtcaggctgggccccagtggagcatgtagacgatggcttccctccccactccctgggagcctgcatcggagctgtaccattaaagagggttaagcgttgccctcccagggtgcatccgtaagcagtgcacgcagaggtgaactgagcacatgtttcctttccagatcctcagcacaggcctataagcctggagtctaggtgaagcctgggcccttcttggacagtattatttattatcttgctattatcatccattcagatatgttagggggtagacaacaaaactcatgtgatgttaaaataaaatgtggacttgaaagaaatgtgggatggcttcaaagctggttccagttaggtggggagatcagggaggcttcttggaggaggtggcatttgtgctgggccttgaaggatgggtaagatctggccgtgcaaacatgggtgggaaaacaccccaccagaaaccccagccggttcctcaccgtgtcactcctcacacayggggtgccacgtgcttgacatctgtcacctccattctttactgtccggtgasaaggagccatcatcctatttggtggaaagggaactcgggcactgagaggtagggagatgagggaggtgtctctcggctgggcggtgacagattcagagcccaggctcagagccctacgctttcctttcctccgtgcgaagacctagtaggaaagcgtcctgggtggcgcaggcctcgctgggaactggtgcagagctcagagggtgggctgctctgatctgacctgggccccagaggaacagctcacgctcctggaagccacacacccacaaggaccgctatggggaccgcctgtttgtcagccacgtgtgtttacttgagttcttgcgactgccccagctcctccctcaggccccctcctcacactgcacaccccaggcaggactcagccctcctctgtccctgtgggaatggcagagaccccagactaggagagggacaggataagcccggctcaagcctgcaggagcaactctctggctccctctggaggcagctcagggaaatgaacatttccaaccccctccggccccttgtccggtcacttacctccatccctgaggtcagcaaaggcccatgaacccctgaaactacgtggaatgtgttctatgagcattttcagggggagggggacacagctttctgaaattctcatgaaggaccccacgaaggaggggaatgactgttctggagcgtgaggccgtaagctgggcacttggcatctggcccagctgacctattgatgctaaaataatagcaataactacataaaagcagmacaacaaccaacattttttggtggcttgtgatgtgctagaaattgtgtgtagcaggactgcgttcggctggtgtgcggtgcttaacaaatcggggctatttttctcccamaacagggagtctggagagggcagtccaggaaggtgggggggctccatgaccccggcagcgccacagtggttccttctgtgatccagtccaccatcatttgggcgttggttttccaccttcacatgtggtacctcatggtggcaaagtggctgccacacctccaagcactttgcctacattccaggcaggaaataggaaatgcactagatctcacccctggggtctgttgcgtgtttcactgtgattgtaaaatcttccccagaatgcttctcagaagacttcttacacctcattgtctagaatgggtccctggcagccaccatagtggctgggaagattaatggtttaacagcctctgtggttgaagaaggcaagggtgaaggggctggggacggttgttgaatgagccacactgaggtaagtccatartatrctttgcctcatctaagcctcccagctgtcctgggaggtggggccggtattctccccatcccattttattggaagacaattgagttaaatggcaaatctgtgacagagccagcaagcagcggaccttagattgacagtctttctccagagctcttcctcaccctgccactagagggcaggagatgcttagtgcacggcagagagaacagcatgcgcatttggacgcgtgcatcaccaaggctgctgggagctgagtaaggaggacacacaaaaatgcagagccgggggtgggacacgaacactaaaacctgctgccattcatcccccttgattttagttgttacacatactgagccagtaccctgtgcccaacacagtgctagaccctggacccagagagaaggaagaacctcggcctcaccctcgagggtcccagacagacaggaacacagtgaccctcagcttggtggggctgcagcccaggggcccaaggggaaggcaagggtcaccaggaggacacgggggctggggagggatgagcagggccccaggcgggagtcaggtagccttgtctaaccatcctgtgtgcagtgaatagcaggcccttcctcccaatcctgcttcccctagtgccactctgttttcctgtgtagtccttgccaccatattagtcagatggctcagagaaacagaaccaacaggatggggatagagactgagaaagaagggagatttgaaggaattagctcacgtggcatgttctaaatctgcagagcmggcgggcaggctggtgacccaggggagagtgactatgcgagcccacacgcatctgttagcggaatcccccggtcctcagggaggtctgtctttgttctatcagggccttcgactgattggacaaggccccccacatgatggagggcagcctgctttactcagtatatcagcttaaatgttaacctcccctacaaaatgtcttcacagaaacaccaagtatctgggtaccttggcccagccaagctgacacacgaaattgacgttcacaccacccttcacattttctgtgttcgttggagttgttaatttcaactcctgggagttgaaaccaggctccatggcacccagttaccttcccttccgcacccagagggcagagcccgtgccctgttgtcctggcagctccagcctcagcagagggctggcactcatgcggccctccgggtacagggcttgtaggaccggctgcagtcaggtggatgcaggtcctggggtgtcaccctctctcctgtggggtacgggaatcctggggaagggtcctggtcagcctcttagaggctgtgtgaccctgtgagcctcagtgcctcgtgctgtggatggatgagaaacctctgtgggttccctcttcccctttcttgatggccgccaccctgtgttctcggagatcattaccctcaaaaggcctgccctgcacttaatgccagaaccactgtgaggttcgccctcttatcactttaagtttgaagaaactgaggctcagagagatgaaatcacttgtccaagatcacacagctgggagggcagagccaggatctggaccccaggtggtcctggcccctgtgctgtgagcgttctgtttgtcacagtggactctgctccctggtgctactcccgtctctggccacagctcagaggtcagccgtgtgcctggtcgtgggcccccgataagatgagcagggctgtattgggctgtgtcacggtggaggtcagccgtgtgcctggtcgtgggccccccgataagatgagcagggctgtattgggctgtgtcacggtcggggtcagccgtgtgcctggtcatgggcctcccgatgagatgagcagggctgtgtcgggctgtgtcagagcattcagaccctcgctgagatgagyaggtctgygctgggccatgtcagggcatgcagaccctcgctgctctttgagacccttcttgtggaagggccaggatggtcgggacgccccgtccactcacctcatcccttatcccaccaggtccatgactaccttcggagcaagctctgttccctgtacgagaacgactgcattttcgacaagtttgaatgtgcctggaacgggagcgacaggtaagccctgacctcagcccgcacctcacctcacygtagggrggrtttctsccctgcaggggtctgggytgggattcyggtgacccgcagcatggggctactcagcctcaatgggtccaggtgtctgggtgaagcccacgctttccagagcaggtccaactctcagcgctcagattcaaggggcaggacatgaaattcttcatcttctgtcactgaacctcacagccacgttggcgcctgccctatgggcagtagtgggaacatgtttagttaattcagggtccccggtgatgtgctcccctctcccagcttgtcgggggcgagggctatagcccatcatccatccacacctgtatgtcctgagacagccctgcacccctgtggctttgaccatcggtctactcacccctcctcccatcaccactactgtctccctctcttcctggtgacaccccactcgggcccgctgaggctcaggggcaccttggagctcctacaccctccagggcttgtcacaatccacaagtccagccgtctctcaaccccacctgcctggaaagtggcgccccagtgccagaagtgagttcctgtgtctccctagcctgggctcagcccagggcgggcatggacaagggggctgtggcaggggctcctgacctgacctctacccgtgggtccttacctctgtgtctcttctctgggattcttcctccattctggaggtgggaaaatccctcttctgccctcccaaatcacatcagctttgtgctcagggtcctgccaggcgtaagattctgaaatggacaagcctactctccatctgtgagtttcgatctcagaagctgagaggtggcctctcagtgtctcctacagctgcttcctcaaggacaggatgcctctttgtccagccgcccagattcagaagtgggtctccagatgatacacagtgtggagataaagactacactggctgctagatcagaataccacctgtcaggagcccatgtactgtcacctcctccccgcagtcctgtccagtgtggtgggcaaggagggtggagtgagagccagcagccctgacttgggcatcacctggtggggggctgtccaccctgtggatggcatcagtcaacatgacaggtctgggctctcccagacctctgagggtggctggcactgtggtggtcatgtgagagctgccgcactatgactctctgtggctctgggcatagggctgggaccatcagggttggtgtgtgggatgaggggagggctggacatggcagagacaggaccaggagggagccccctggaagcagggctggatccaagtggggggccaagtcattgtgtccagggaaggagatttctgagagagttgccaacatcctggagctcccccagcccgcaggggtctctcagcagagcccgagctcaggcaaggggctggcatggtgatcacagggggccactaaaggatgcttagaaaaccaggatggaggcccgaccyggggctgggctggcacagctgggtcagcaggacacaggaccttctctctaggccctgcccccagatagatcccagacacccccagcagacagggctcctcccatgctgctgagctgcatttggggttccctggtgcagtgggtcccaagagggtctatccaaatcggacgagagggacctgcagctgtaacaagctgattccagcttttatgtgcgttttgcggggtaggtccccgctggctgcgacccactgcccgtccttccttcaagctgccaccagggggcacccgcggccaggtgatgcctgctcccaggactggagaagccgccaagcatccccaggctgacagtggtgtccaggcctgggctctcctgtcctgcctcccacccgccacttcctgcgtgcactttacacgccagccacgccctgtcctagtggtcccccacccgcctcactgtctctcgctccacagctggctctgctctgcccggctggaacctctgtccttgtttgcctcccgcaatgggtggggtgccctggggggctactatgactcaacctgttctgagcccttcactggggacctcaggtgtgtccagtggctgtgggtgtttctagaaggcatagaggtgtgccacctcccagttcactttgagcactgttctgagaacaacatgccccatggtcaggggtcccaagataaacagaccctgggtcctgccttccagggcctcagaggctcaggagagaagcaaggattccccccaggttcccacatccttgcagaccaaagcaaactcgaatcctggcaggctcccagttgctgccctcttattcctggtgaccccctctgacagttggtccggcccgcagagcgccgctgctgccgcgtggtggctgcccgatggcccctgccgtggggcttcctagcaccggcagaacgcagatgggcagcgtgctgtggagaggcagcagctctcctgctggactctctcagtctctggtccacattctaccctcgccaccgtgtgcttgaggaagcccctaagtcagctcggctggaaagtggttctaggaaactggccttcgtggccgctttggggatgagascatgtgtgatgccttcagcaagatcccagttcgtatgcgcaggggtgccgcagtgatcctgcgtggactatcctattggcaggcctgcscttccccaggttacctacccggaggaatcccgcaggccctcccacaacaggcttcaacgccccctcctccatgaagttctccttgatctgtcctgcctggggggagagatttgtgccagccgagcgtgctcgggtgcgggagtcaaacacacctacacttgctctgaggagtcctgggcaaggctcccccaggggcccatgctgtatccctagggctgtttttttctctccggccgttttcttctctccatgcttccccatctccgctcctccctgcttcttcttacacactggcctcatcctctccctcttcagagatgacccccaaatcattcccctttccattatcctcagccagccaacccctcccagggactgtgtaaaactctcatggaaggatctgattgkctctgtgtgggtcacttgcccactttttgcaccaatcagcatggacagggatatcacatgcccaagttggccaggccaaggggcgrggagagcactgtgattgaccgctcacagggatagggagtgcagtggcgccatctcggctcgctgcaacctccgcctcctggagtcaaacacttctcctgcckcagcctcccaagtagctgggattacaggcgccacgggtgkcgagggcaggagcctttctttccccaaaggaaagaggagcggagcactggggctgaaagcagccggcgttgtggtcccacatgcagatgaggctaggagaggtgaagcagctcccctgcccttttccctgttaagggaaccttctggaatttaagaaacctgcctgaatgtgaggaatggctctcatggtggtgcggcctggtgctctaggatgagaggggcccctccctctcccccagagcacgtgtcagctgaattccacacccgaacagggggaggatcaggaactgtgtgggttgcaaatgactttaattatgtygctctccttccactaaatggatcagaagaaccagcattgtgtgaaatcacccaggttcattctgtgaactgttccctgaagaacaaagggggctgcctccccactgtgctggcgcggggagggtgtggcctcccccagtcagcctgtggcgcctgggcagggcccttctgtgggactcgttcacccggcccccctcgcatgctgcttcccttgtcccaggctctgagtcacatataaagcgggtgcggctttggtcacatggacgattaggatcgaggagtacctggtaaataacaagaagcaaagtgcctcaagcccagcactgtgcggggtrttcagcctatgtcccctgattcacgctcaccaggggctgcgttcccttgttgatcccagttcttatagaaaactaagagagtgcgcatgtcagggtagggcagagctgggatccggacccaggcggactggccagagcccaagcccctgactgcagtgccggagctcacgtgtgagcttttgtcctctgtgcataacccctggagacccagggatccacctggttctgtcacagagcagtgtcaccctcaggaagcccagctcagcttccaaaakgaaacaggatttcctccctgaagagccttcagcaggacaacttctttatggtcgcttttcgtaacatcctcttcctccccagttaccttgcacctcacagctgctccagggccctgcagaggccaaaccccaaaaccctccctctgggcgcaggcccacagaactgtgctttctctcctgcctcttactatgtggatgaacttacccttcctcccaccggcaggaaccccttctccttaggagcagggagagcagagaaatggtgtggaattctctttagcgggacggtgagggcagcgagcccctgcacgtcagcactgctcgccccgaccctcatggcgatgcatgtttgtttattcgcccgagtcctcgggacaggcgggcccctggagggaagcagggcctggtggttttctgtcccagctgcttccatgtctacctcctgctgtggttgcacagtctgtttggaaggccagagctttctctcctggactaacagaaattacaggagggtcttttcttttcttttcttttttcgagacggagttttgctcttattgcccaggctggagtgcagtggcgcgatcttggctcactacaaccttgcctcctggattcaagcaactctcctgcctcagcctcctgagtagctgggattacaggtgcccaccaccatgtccagctaatttttgtatttttagtagagacagggtttcatcatgttggccaggctggtctcaaactcctaacctcaggtgatctgcccgccttggcttcccaaagtgctgggattacaggtgtgagccaccacgcctggccaggagggtattttcatgatgattggggcagaggataaaaaggatcttagctcctggccccaaagtctgcatgttggtggcagctgacatgtgagggggtataagagaccccaagatacaggggaatagaggcaggtgtggtttccctttccagggagtgatggctctgtaggctctgggattgctttttcatttgtttgttgttttgggacagagttttactctgtcacccaggctagactgcagtggtaaatcacagctcactgcagtctctgcctccccaggctcaggtgatcctcctgcctcaacctcctgaatagctgggactacggtcatttttaatttttttttgtagaggtggagtctcgctatgttgtccaggctggtcttgaactcctaggctgaagcaatcctcccaccggggcctcccaaagtcctgggattatgggcgtgagcccccacacctgggcttatttctcgagaaggggcttgtgctcctcctcacctgatgcctctccttctcccaccagcgtcatcatgaccggggcctacaacaacttcttccgcatgttcgatcggaacaccaagcgggacgtgaccctggaggcctcgagggaaagcagcaagccccgggctgtgctcaagccacggcgcgtgtgcgtggggggcaagcgccggcgtgatgacatcagtgtggacagcttggacttcaccaagaagatcctgcacacggcctggcacccggctgagaacatcattgccatygccgccaccaacaacctgtacatcttccaggacaaggtaaactctgacatgcactaggtatgtgcagwtcccggcccctgccacccagcctcatgcaagtcatccccgacatgaccttcacgaccgcaatgcaaggaggggaagaaagtcacagcactgatgaggacagctgcagaggtggcagtgtgtggacacaggaagtttgggycccctccctgccccagctttcctaggccagaattgtgtttggcagtaattgtctgtttaaaaaaataaaaaggaraggaagcgttcaccgccrcaaatcataaaatggacatgactgtggagtcttacagttcagggttctttcattcacgtcccttcctgtctcggtctgcggtctttaccacatcaataggactttttatgcgtccgggttaatttttcactccagtgcgtcctgttgcagggaccggagctgatgggagctgcttctcccccatgcctcactggtcccagatcagggctccagggacagatgatgagtctcaaacgagccagccaggggttcttttggttataaatggggcaattcgccctgtctcagagctgatgacctcaccgttgttttttggatggtgaattcatgctgagaatttgcagatgcaagctcctctcmtaggtcttctgaatgtcttgaaacatcccaggtcccaggtctggtgcggtttcccgagaggagcggagtggggtttgtcttctgtgtgcctgtgtcctcatctgattcacctgccatttgctgagcctctgctgtgtaccaggcgtggtgctcagccctagaggcagttgacttaccccctgcagccctccctgccgcctcacccttcagcattcactgggcaccttcccggagcggacactgactcccatgcacgattttttggaatcttcctcctgactgtgaggtgggtgttcattcatttcctccataaacaccaacttctcgaagcgtgccaggctctgggctggatgctggggataagcgggaacccttaggatcccctctgtccacgagaagaagctgaggctctgagcggatgcacaggtcacccatggcaggtgccgtgcagtggtgtcaggaacccgtccgggtcttcacacaaggttctctccagtccatctcgtgggcggctcatgttagagcgacattcaaatggaaggtttggaaaggaatgcctctgtcttgtgaagtaggacaagggtccgggagaactgagacgcaggatggaagacagagaagaccccccggagctcctcgctctgcttggtggcttcaggagtgcggccctccccaggactccacttcatcctgggcttgcaccctccttgagccaatgcactgaactgcctttgaaaggaaattgcatgttctgaccattttaggatacctttactttaaggaccacacagtcccagaggacacatccctcgggaactctgcccctctgacaatgagggccacagagaaggtggtgtttccatggtagatgctcctgttctggtgataccaaacctgcccacccctctgagtcgtctttgctcatggacttgcagcagagccacgtagttkggcattttgattcagaaagtggggagcagagacccagccaaatccaaactttttttttggttttgttttgttttgttttttacaagatataacataacccaggaaacagacccagctgaggttattctcagtggattacagtatacttttgtgtgtgtaaaagcacaaagtgcatgtgtactcacttctggccatataacatttacacagggaaatggatcattgatttttttttaatcaacgtgaatgaagaatgtttgtttatatatcactataaaatccagttgacctggacagtattatatgtacatatctattctaattaaatttaacaatcaaaggattggattacttttttcccccttgtaaagaggttcgagaatgtggtcaattgtatagatagcgtgttaaagccaaaacccagctctgagggccttacccattacttggatatttgctacgatccatctccctttgtgagtcaaatgttaagagaagaaacttgtatttgcagctagaggttactgtcacatcatagatttaacatttaccatcttcaaagtacaaatcttacatgtccttcaaaaggaggtcttaatacagttcctagttccttacttctgttttaaactttgggtaccaaaccaaaaagaagaaaaaagaaaggaaaagatcttctttgaagaaaagtatgtctctggatccctggaaaataatgatgtccaaagcaaattgtgaagatcaaatgtgtgttaagaaaaggtgtcgaggggagggacaaaaccagaaacggtggaaggaccagtgtaatagtcacagacttgcatcctggctctgcttacatttcctggtactctcgaatgtacgggcgttcacatagtcattgtgaagttgttggggtttttttggttttgtttttaatttagctcttctctgaggacgaagctgttggtggtggtggtggtgggggtggtggtgtgggatacatggtggtcaagttgtcagccctgatcagtttggactctgtaactcataggtgcattctttttttctttggtgtctcacaaattacccaattgttgaataaaactataaatatgttaataccagctttttccaataaaataacaaatgttacatcaaaaacgaggtccagaatgctgtttgtttttagtgagtccaacctcatggaggtggagcccatcaggaggcaatacagtgggtggggatgcccatgggctttgcactgggaagctgggttcacgtcaagggtttgctccctctagctcctaatgcagctcttaactttccctagctctgaattcatcactgaggaaatggagctaataagacgacctatcttgtaggtttgtggtgggagaggaaggacaagattaacttggatagtgcaaaacacagtgcttggcacatgacactccgtaatgatagttgtcttgttttgtctggcagcaggtgtgcatagcccatcatgatctccacacacactcacactctccatgagaatatgatacagatgaggaaactgattcagagaggttaaagaattagctcgcaatcacacaggtagcacataactcctcatccagtgctcccccacagacgtgcctgagggtcccagagaatggaagcctgcgggggagagaaaccacagggtacctggattcttcaggaagccagagaggccccgccccacctgccacaatggctgagctaaacaggagagtgtgtgggtaagtgtcccacgcacgcctgggtttccctgcaccctgcctggagccaggccctgcctctggctttcaggagggaattctgggcttcaggttcagcaggaggaaggcaggtgctattctgcgggtctgctggcaggggcttcattggcgctcagttccacagctccaggacagagcacagggaggaggtggccacttcctggatgtgcgtcactggccactcactaacctctctgactgtgtgtgtacatagtgggagggcatgccgctcctcctcagtactgtggggtgactcgactgaaccccgcagtcctgctgtgctggaggtcacccggcccctacagggaagggatgtctcattgtggctgcatgctatcctttctgcagagcatgggggttgctattgttatacccattgtacacatggagaacaggaggcctagagagatgaggtaatttaactgatacccaagttagtagaattaataagtggaggggtcaggattcaaaccccaggggtggaagtggcaggcatgtgcggaggcccagggtggtgatggatcctgcagcctcagcctccccaaacccaacttcagccaacattgaccaattgccagctctgggatcttgcagatgtgattaaggtcatggacctgaagatggaatttagcctggattatccatgtgggacccatctaatcacccaagtccgtgaaagtgtaggaccgttcctggttgtattggagacagctgtagcaacagaaaaaggctcagcaaggcatgacatgaagactcgaccagcggtgctggatgtgaagatggaggagggggccaccagcctaggaacacaggcagcttctagaagctggaaaaggcaaggaaacagatcctcctgggaccttccggaaggaaccagccctgcccacaccttggtttcagcccagtgaggcctgtgtcagacctctgacctccagactggaagataataaatatgctcttttaagcctctcagtttgcagtcatttgtcatggcagcgccagggaccccatatccctgggcacttcgtcctggtgacaaagccacccctttaggtagggattttccctgctcacaggcaagggcccttgggaggtccacagcacgcagggaagcagcaaagcggggcctgtagccctggtggcaccacgttgcctttcttgagcagggcaagggtagggctctttcctggggagtttctggtggtggtttatggggctgcagaggacagaggggcagccagatggtggcagaggtagtgagcagggcttctagagggccaggcgtgtgagggctggagcctgtggagtggtggggagctggcccctggccagggacagcttggcctgctccagcggggtctgcacacatggatgggcccccactccacaccaggccctgcgctcagagctgtggcaggcagagatggccttgagagggctgggagaaatgatgctcaatgctttccctccctggatctctccggagctcatctctccccagccctgcgggtcctgacgttcctgacacccactgggctaggtccggggcttggcttggcgggggcgcccctgggtgacctaccctcctgcccgacctgccctccacccactgggctaggtccagggattggcttggcggggggtgggggaagcctgggtgacctggcttcctccctgacctgccctccatgtcattcctagtattcacagaggacacaccaggctctatacggagggctgtgtacacatcatctcatccatccacacagccacctgatcaagaggattctgtgatttttccgcgcattttataaataaggaractgaagcgtgaagaggtgggtgagtccctcatggccacaaactgtgagtgttggggccagggtctgaccccaggcagcgtgtccgcagagccccaaggtcttaattactaaactgtatcctggaccttctggctacctggtggggcctcaggcctcggaaggtgacattctggtgtgtgttttcccagccgctgctcacacctttccctgcctgaaaccaactgtgcaccctttgctcctgaaaagcctcctgagctgagcgcctcgattcctcctttccccacagcccaggccccctggcactggcacggacacagatgtgagaccagggaccatcattcactcaccaccgtgtccctggtgccctgcacagtccttagggactacttactgagcgaggtgtatgtgggctcaacactgggtcccctgcaggagcccagagaaccctgctcaacactgcagatcaaacaccctcgctcccacaggctcgagagtcaaagaagggatcaaaacaaagagaacgggagctggaccgtggccttgaagatgggaagcaagaaggcacatgggggagtggaaacagcttagagactgagagagcagagcccaagcccgcggtgggggcaaccacaaggcaactggtttgcatcatagaaccccagaaaggctctgggcctggaggcaccagggacctctgagggtggggagaaaattgaggttttctgaatgtcttcctcagcaagcatccctctcccagccctgcagaaggcgggaggttcattccccagggattgtgcgagaggctgcggggaccgggaccccaggaagacctggcggcaggcagccaactgagaacaggtcacacccaacccacccacaccccggggaaggttaaaggccccctcactgggaaactggccagctggagagaaaagacctaggtttggacacttggaggtccctcgagatactgctccatcggccagacacggtggcttacccctgtaatcccagcactttgggagaccaaggcgggcggattaccagtggtcaggagtttgagaccagcctggccaacacggcgaaaccctgtcgttgctaaaaacacaaaaattatccaggcatggtggcatgcacctagaatcatagctactcgggaggctgagagggaggagaatggcttgaacatgggaggtggaagttgcagtgagccaagattacaccactgcactccagcctgggcgacagtgagactccatctcaaaaaaaaaaaaaaaaaaaaggtactgctccaccaaagcatccaactgggaagctggcagtttgacacgcatccccactctgccacaggcacacagagattccaggcagctgctgagatagaagcagacagcccagaatgccagacactcaaggacagccctgctgtggaaaagaccaagacaaaaacaagcaaacaagcaaagaggaaggaaaagaagctgcaacctttagctacagtgccaggtggaataccgttttcaaaactcggataatggatatctgcatagagataagagaatatggaaaacatagccaaggaaacacgtggagactctaaggaaaccatggaaattagaagcatgattgcaaaaataaagatctctgcaaagattggaagatacggttgaggaaatttctcaggaagtagaacaaaaaatatcaaagagaatcccaaagaaaataggtgagaaaaagagataacctcggctgggcgtggtggctcacacctgttaatcccagcactttgggaggccaaggcaggctgatcacttgaggtcaggagtttgagaccaagctggccaacatggtgaaacccgtctctactaaaaatacaaaaattagccgggcgtggtggcacgtgcctgtaatcccagctactcgggaggctgaggcaggagaatagcttgaacccggaaggcagagcttgtagtgagcagagatcatgccactgcactccagcctgggtgacagagtgagactccatctcaaaataaataaataaataaataaataaacaaacaaacaaagctaacctcctcaaagaggcctcagcacacagatatgaggagttcaacaaagaaaatggaggaaataaaatattcaaaatgtttctgacctgaagaatcaaactttgcagatgaaaagaaactacagtgcccggcgcaatggtggaaagcctacccacttccagggccatccctttgaggatcagaactcagggagactgagaacactgtaaacgatagcttaggagaatcagaatatgtcttcaggcttcccagcagcaataagggaagggagcgctgctttcaaactctaagaagaaattcttggacctcgaatgctggctatgccccttcaaactattgattacacgtgagagggaaatgaaggctttttacccatgcaaggttttgtaccaattagcttttggtgtgtaatgaaacaccccagaatttagtgtcttaaaaaaaaaagagtaaaaacattgactatttcttacaattccgtgtgtgggctggcaggcagagctgaggatgaatgttttagaacggcctcactcacaggtttgctggttggctcaggacaacacagatgccatcagcaggcatctctctcacccagcgggctctcccaggccagccctgtgatcgccccagttgttaccagaaagcggtctcaatccagactcaagagagggtttttggttcttgcacaagaaagaattcgggacgagtccacagagtaaagtgaaagcaagtttattaagacagtaaaggcaagaaggaattgctactccataggcagcgtacggtgttcccaagagcaagatgaggaacacatgtgccttaggtacagtgcttgttcatatataagacaaagccacaaaatcctgggggaggtgtgctctgctactagggctggtgactaaggattgttcatctttgtgcaactactgtcttctgcaagaatctttaaagcaaaaccttttttttttttttttttttttagacggagtcttgctctgtcgcccaggctggagtgctggagtgcaatggtgcgatctccactcactgcaacctccgcctcccaggttcaagcacttctcctgcctcagcctcccaagtagctgggattacaggtgccagccaccataccttgctaattttttgtatttttaatagagatgcatttcaccatgttggctaggctggtcttgaacccctgacctcaggtgatctgcccacctcagcctcccaaagtgctgggattacaggtgtgagccaccacgcccagccaccaaacttatttttgaactaagaatgcttttgttcttaaggtgtcgggacatcaggacatctcctggatctgttaagtccggggtctgtttggtaaacatcgttcacttgttccccatctgttaatctcctgttgactaagaatgcctaaccttctgggaatgcagcccagcaggtctcagcctcar

SEQ ID NO: 95895 - DNA, 69062 bp, Homo sapiens
  misc_feature (1)...(69062): n = A,T,C or G
ctctttatgtattccctttattctctttaggtttatgtattccctttattccctaaagagttactctctttatgttgggcccttggacgacatctgaattagtgctaaggagataactcaggatgggaactggtcatcccagaaagaccaaccatgtgattaaagggttgaagctttgagccacatgttatcagcccaatctcttgacctttaagcagggaaaggaggctggaaattgagttgaatcatggagccaatgattcagtcaatcaatcatggctacataatgaaaccccaataaaaactgcagacactgaagctcagtggaacatcctagtttgtaaggacatggatgtgagggagggtcacatgttctaattccatggggagaggacacagacgctctgatttgtttcctttataataaaacagcaaccataagtatagtgctttcctgagttttataagttattctagtaaattatcaaatatgatggaattgtgagaaactctgaatttgtagccagttgggccggagtgctggtggcctgcagacccctgaacttatggatggtgtctggagtggggacatcttcagtcttgcttgggactgtggccttaacttgtgggattggaggtaactctggattgttactggccaaattgcattggggtacatcagatgccattataacaaagacttcagctgatcccacagagggttcagatgctctgaagctcacagttgtcctaagttggtagacaggccaagcctttatacctgtagaatgtattcaggctgcccctgggcatggcagctttctttagccatggaagtttctgaagagggctgacacgaggatcgtgtgcaggtggcaagcactcccagagctgagggatgtctcattatgaaagtgagattttgatggcaagccatagcaccactatagtttgtaactatttctgtctcttactagagagaggataaggtgattaaaaatagtactgaaaattctttcaaatttgtaagcattttgttgctaaagaggattcaaagagggagactggtggattgatcctggcaaatcctcatgagtgatcatgttgttttcccacttaaatctcatttctgttttcctcttgttttaggaaggataaaggcttacctcctcagcaggactcctcagatggggcatgatatgccctgttcttgcatctgcaggatcacagatgacaaattcctcatctcaacacatccatgttgttttctctgtctgtgggtcgcacctgactttttaaagcttcagggcctttgcacaggctgtttcctctgcttggaatgctttctgccctctctgcctggacaatttgcattctttttttttttttttttttgagatggagttttgctcctgttgcccaggctggagggcaatgatgtgaccttggctcaccgcaacctccgcctcctgggttcaagcaattctcccaccttagcctcccgagtagctgggattacaggtatgcaccactatgcccggctaattttgtatttttagtagagatggggtttctccatgttggtcaggctggtcttgaactcctgacctcaggtgatctgcctgccttggcctcccaaagtgctgggattgcatttatttttaaggtttttgtctaaatgtttctttctcagagaggcattccctaaccctcaatgtagatcaaggccacttgttatatgctctcacaatgcctgtcgtctgtagctggccttttcagcacttatcatcgtgataacaacatagttatttatgtgtttagctgttcagtgcctgtctctctccctctgccacgttttatgaaggcaagaactatggctattttcttctttcctctttccccagcacttaatgcctgacatgggagcttaatacatatttgttgattgaataaataaatggtaatagtgatactgtacaatggtcaatagtgcggctctagagttggactgggttcaaataatccaaatccccacttgtccactgagagttctgtaaactagttctctacatggacaatgcagaagttttatcagttcatgttcatcttgtcagactgggagaacttatcttcagtaaccacaccttagacgaataaagtggaacgagaatatctatttatcagccgcagcagaacatagcaattaagcacacacactgtctgggctgaatctcagaactgtcatcttggccaaaatacttgcctctttgagtaacagtttcctcagctgtaaataagagtaattcattggactaaacttgaagttgctgtaagtctcaaataggctcaaatgtgtaaggaacagcatctggctcatagtgctttgtatgtgtttgctattagcaattattttttattaatttaggttgacttgagaccctgcagctggttagctgcataagacatttcctccaggtgagaaagtccatgtcataggccagagggttgtctagtagagaaagagtaacagtaagggaaaataggatattatctggaaatatttccagccaagtttgtggagggcctggtgggtgccttttctctactccagggataatgatgtctgaaaatccagggtggatcatttagacctagaattctacccttcttcccaaggagtgtgcacatcctggcagcctctggccacttgttccccttattctagattccagagaggtcactatccttcaataagtagggcctttctctttcctcctttccttcttttcttcctttcttctttccttcctttcttcctttctttctttccttctttccttcctttctgtctttctctctttctttctttctgatggcgtcttgctctgttgcccaggctggagtgcagtggcacaatcttggctcactgcgacctcaacctcccgggttcaagtgattctcctgcctcagcctcctgagtagctgggattacaggcatgtgccactatgcctggctcatttttgtatttttagtagagacggggtttcaccatgttggtcagcctggtctcgaactcctgacctcatgatccacctgcctcggcctcccaaagtgctggaattacaggtgtgaaccaccacgcctgcccagggcctttctttaattgttcaggtcacaacacaactgatgaggttatggttttctttagctgtaacctaggcccaagggaaaagtctcatcaccttgatttcagttcctctttcatcatttatgagaggctgacatctgagtggagcacttctgcaggtagaattctaacttttttccctgattatttctccaaaattttagagcactttatagcagtcatcaaactggaaacctgaagactgagattttaatacttcaagtgaaatctgtattttattctgactttgataccaactgattgtgtgaacttcaataagacctaggggttcagtttccctcatttgtaaaattaagcaaaaagagaaaaatcagatggaatccagtgattatacatcatgatctgaaaaaagtcaacacaattgtccctcagtatccactagggattggttccaggagaaactgccgacactaaagtccgtggaggttcaagtgtctgatataaaatagtacagtatttgcatataacctatgcacattcttctgtatacttaatcatcactagatcacttataatacctaatacaatgtaattgctatggaaatagctgttatactgtattgtttaagaaataagagcaagaaaaagtctgtacatgttcaatacagatgcaaccatccatttttaaagaaaaatatatttttgatttgcagttgattgaatccagggataaggaacccacagataatagaaggccaactcatcattttaatttcagttttttcctatacatatgtaattatgataaagtgtaacttataaattaggcacagtaagatattaacaactaataataaaacatttataacaacatacagacagtcttgacttacaattgtttgaccagattttttgacttcacgatgggtttatcggtatattaactgcatgttcaacttacaacattttcagtttacgatggctttgcgatggccatcaccccatcataagtcaaggagaatctatactgtaatagaagctatgtgaatgtggtctttctctcagaatatcttactgtactgtgaaagcaaaaccagggacaaagtagggactatggtacatttaggatagaaagttgtactgaatatttcacaagtgaaaaatatactcatttttctttgtgttgactttccaatgtggatttggtacaaaaaaataaaaaccctccttaccaattgctggctgggtgcagtggctcacgcctgtaatcccagcactttgggaggccgaggtgggcagatcacttgaggtccggagttcaagaccagcctggccagcatggcgacacctcgtctctacgtctctactaaaaataccaaaattagccgggcgcgtagccgggcgtggtggcgggcgcttataatcccagctaggagggaggctgaggcaggagaatggcttaaacccgggaggcggaggttgcagtgagctgagattgcaccactgtcctccagcctgggcgacagagcaagactgtctcaaaacaaacacacaaacccctcatcagttgcaatatttaagttgcatttaatcctagcaattgcagtcctgagatttggataagaaccagagtatggtcttccagggcagccaaaccaagccattccatgaacaacagagatcaccctgctgcagatggtccacagatcttttcttgtgcatttcttctgggaacaaatgcaactgaggaagcagacatattctagggggagagatccacaaaaatccttagagtcatcttgccccacctccttgttatggctttaggtacagcccttatggctaggagatgtaaccttcctcagcctttgcgtctacgtctacaaaataacaactaccttgcagggtgttatttaacactgcgaaagtgcattaataggcacagaaaaacaaaaaacaaaaaagcaaattgtgccctcactgcgaattctctgtattctagttaaaaacatctatagcttgggtgcatggtgtccgtgctgggcaagaaaagggcaaaatagatcatgacaagccttaacattttctcacttcagtttcctcactgcaattgatttttttttttctttcaagtcggagtcttgttctgtcgtccaggctggagtgcactggtgtgatctcgtctcaccgcaacctccgcctcccaggttcaagcgattctcctgcctcagcctaccgagtagctgggattacaggcgtacgccaccacgcccagctaatttttgtatttttagtagagacggggtttcaccgtgttggccaggctggtctcgaactcctgacctcgtgatccacccgcctcggtctcccaaagcgttgggattacaggcgtgaaccatcgcgcggcccctcactgcaactgagggtagcgcagtggccgcaagttccagatctggagttactaaatagctgggttccaatcccggctctgccacttattagctgtacgatcttcattcgtttctcaacctctctgggtctgagattcccttaaagccggggtaatagaaatgaataggatttcctaactaggactagactttctcaatttcttgactcagaggggcaaggatagcctgaaatggaaagtgaaggccttcaggttcttcctaacagccgctccgaggaggggaaagctacaggaagagggaggagacccaagaaaggtcggaccaatgaggcagcgggcgggacaggagttcccgcctttgggcgtcgtgcgcgcgcacctcgctcacacgcacactcgcacgcacgcacgctgcggaagcgcgcgcgcgcgcaggcccagccctcgtcgccgccgccattttagctgttggttccggccgcaccgtgtgggctgtagtagcgggaggggtgggggtcctccagagttaagtggctgtcctcgactgtgcccatacagcagccagctttcttccttaataactgcccgttcgaagagtgcgaggatgtccaagcggcaccggttggacctaggggaggattacccctctggcaagaagcgtgcggggaccgatgggtaagccaggccgggggcgcgaggcggcagctcgggctttgttggggtcctggcagggagcgggccggggctggcctggccgagcgggtcctggagcccgagcctttgtttctctctgggctgggttcactagcggcgggtaggagaagcgcggcgcccgttcggcccggcaagggcgcggggggttgcgtgcgacggggccgctgcccagcccagtccggagggtggagaggcctgcagtagccatgagggcgcctcctcccccaggccgaaccgagcgggagtcatttgcgagggcgtcgggcgggagtgaaccgcggacctcgtggcctcggttcccgaggaaggcctggagccggaggagagggtgggggagggcgcggtgggagtattcgcttccaagggcagcaggcacttcccagccagaggggccgtggggagggcctgggtgggggcgcggccaggcactccagacgggaaaggcggagggcggaaagtgagagcagcgcgtggatcataatgtaggctgggatgggggtggcgggagttgagagaagccagcaaatagggagttctcgggggaggtgggagtagaggacctgccgggagaaaggaaaacgtggagtaatatacctgatgggctggaaggctggtgttttggggcgactgagtttatagtttggcgggagagagcgtgccttggtccattcaaacacttcaaagtagatactagcaaacttccgctctctgcctacgctcccgccatctcctgtatttcctgctttggttaaaactggttactgaacatcgtcccatggggagggattagaaggcattgttttttttttttcatcatttattttctatgcatgtcccacttttcttcataagtagcttttgaaatacagggatcatgttcaaaacgtgtttttagtatttatggcgaaacaccgcccatgtggaggttgagagttgaaatacttacacaaactcttggtgttccagattcctttccttaaaggtacagaggaatttagcagttaatttaagcaatttcgtgaaaatcatttcttgtcccttgtgtgttttcattgatgaagtacaaagacctgtttggataattcaggcaaaacccacaaaagcccgagtagccaaatactttgcataattgtatcattttattgtgtacttgtgatacagaatcactgtgtcaagtcacctgtatagctgttttgaatttttcagctaaagttcttcattgaaattgatttccagggatatgtttagtgtcattgtagagtataagccaggatagggtgtactttttgaggctttgccatatgttgaattattcaatagaaagcaaaagcatgtcacattttaattttgtgagttatttagtttacgatattaggcattgtaaaaaagacaatgacattgtaagacagactctctttaggctatcaccctcccccaccattacgccccacaaaacgttaatacctctgagctgtatgtcacagactcagagctggaagcaacttaaaaaagactatacgcggctccaatcaaggaatgagaagtggagaacagagttaaggtggcttgtgcaagtttacagcaggatctggaaccctgcctttgtcattttcactcagcagcacacagttcagtactgtagttaagagtcattacagcctattttaatgacatttataatgcgttggtaaagtagggaacacttagttcttgatttctctaaggcaaaaataaattgctgtcatctggaactgatgtctctcacaggaggtcagattggaacaaaatattctgggagggaatgaatgaattcatttgtatttgtgcatatgtgcaccatttaaaatgttccccttgggattagtggtcccaccatatgtatgtgcgattgtttactttctcttgcaaaaacagatatccttagtaaaaaggttgacttttggagtctaatggtagctttatgattcccttgtatattatttagaatttgcctatggataaaggagagttcatctttggaataatgcccaagttataagaaatagtagagggaagtttttatactcatttctatgtcatttgagtgccatttatccttgaactggttttatttaacagtggacttaaggtgtttatcggcctcagaattttttcatactcgataattttaagtcacttgttgactgccatgcaatcctgcagattttttttttccctgataagcaagtggttttattggagagcataagcttgtcagtcttacaaactccactgccagatagggtttctgcagtactgagaagggaaggtaattcagtgggagatttcacttatattaatgctcccaaattatataaggctttatttactcctggcatattttaactttgaaatcaggtgaagttattataggtttctgttgcatattctggcctcatttcttctttttgtcaacccacagaatcttcactatacaattaccgaaagtaataattttccatacttactgttgaagtatggaaaaaagttttcgatgttaggggcgtttttcattttgatgttggtttttgatattaccacctgataagagttttttctgttaattatgggaaagtaaagctaatgtattaatactgtgataacatttgtggagcatgcacattttcactacaatcctgtatggtagatgaggttaaatgaacttgccacagggaacataagaaatgtttatactcaaaggtttaaagaaggcattccctaaaatcttcatctccatctttggataacagtttttggtgaacattttctaagatctctgcatattgactcaaaaatgtgaactataaaatttaatatcagtgggatcaacgcgtgttattttgtactttgatttttttttccactcagaaatgtcattaactgtaggtacacattacgcttttaaattggctgccataggccgggcgcaatggctcacgcctgtaatcccagcactttgggaggccgaggcgggtggatcacgaggtcaggagatcaagaccatcctggctaacacggtgaaaccctgtctctactaaaaatacaaaaaattagccgggtgtggtggcgggcacctgtagtcccagctactctgggaggctgaggaagaatggtatgaacccgggaggcggagcttgcagtgagccgagattgtgccactgcactccagcctgggcaacagagcgagcctccatctcaaaaaaaaaaaaataataaaaaataaatagattgactgccatagtactccagttgtaaaggtatgacatcacttatttaaccaatatcctgttcattgatatttaggtagttttccacttgttgctattttataaatgagaagtttgatgaacatccttatacatacgtatttgcacacatccttgagaggttcctggaaataagattgacggataaaaagcagtgcttattgccgggtgtgatggctcacacctgtaatcacagcactttgggaggcctaggcgaatggatcacctgaggtcaggagttcaagaccagcctggccaaggtaataaaacctatttttgtctctgttaaaaatacaaaaatacactgggcgtggtggcgcactgctgtaatcccagctacttactccggaggctgaggcaggagaattgcttgaacctgggaggcagaggttgcagtgagtcgagattgcaccactacactccagcctgggtaacagaggtagactgtctttaaaaaaaaaaaaaaaaagcaatgcttatttaaaatatcatgattttgatgaccagttaatgtcttccttagcagtacttcagtgcctgttattattccatgtagaatttttttattttttagagacagggtcttcctctgtttcccaggctggagtgcactggtgtgatcatggctcactgcagtctcaaattccagggctcaagtgatcttcccgtctcagcctcccaggtagctgggactacaggcgtgccacccccacctagctaagtttaaaatttttttgtagagatggggtctcactgtattgctcaggctggtctcaaacttttggcctctggtgatcctccccacttgggcctcccaaagcactgggattacatgcgtgagtcactaggtcttgccctccatgtagaattttaacatggtattagaacttaaaaagatctttaataataaccaatattggtggggcgcggtggctcatgccagtaatcccagcactttgggaggccgaggcagtcagatcatgaggtcaagagattgaaaccatcctggccaacatggtgaaacctcgtctctactaaaaatacaaaaattaactgggtgtggcagcatgtgcctgtagtcccagctactctggaggctgaggcaggagaatcgcttggaacagggaggcagaggttgcagtgagctgagattgcaccactgcactccagcctggtgacagagcaagactccgtctcaaaataatagtaataataacaacaacaaccgatattgggcatttgcaatgtgccagacaacacttaaagcacatcacatatattaactcatttaatcctatctatactctacaaaacatattgatagccacatcttataggtgagggaagaaataactgtgatcctatagttggcttaagtcttgagccaagattgaactgagacacagtacagagcagtatgttcaacaactgtgtcatgtcatacctccctccctgctcgtggtgtggctgtgtctgaagcactgacttgataccagtttttaaaaacccttatacttcaactagtaaacttttaagaacaaaactcctttataataaaaagtatcttttaaaaaagaaaacacgcatgtgcacaatagttgacaaatatttatgaagtggagggtttgattttccccttttactcacctttcatttgtactccctctctcatcgaaggaaggtagtttgagccataagcaacatttccaggtgtctgaatttgcctcctgcatcctccctgttttcttactttaatctgagactaaaagtatctgaaaatgctcttcattttgcagatcagtaaattgaggcagtgtcttgcaatggtgattccagcattccttttatcttaataccacagctgtcgccattgcttgatcagcagctaaccttttatctttagaatgtattttatacatcctttgtttggtttggtaatgaagcatctgatgaagtgggcccctgaaaaaatctttgttagtataggtattactttaacaaactaaggcaatatataatacatgatttactttgtcacctctcttcccccaaattttgtaactcttgaccatgtcttaattgcctggtactatgctagaagtatagaaatcattaaactaggctgggcatggtagctcatcggtaatcccagcacgttgggaggctgaagcaagagattgcttgatcccaggagttgaaaaccatcctgggcaacatggtgagacccttatctctacaaaaataagaaattagcgaggcgtggtggtgcatgcctgtagtcccagttactcgggaggctgaggtgagaggaccacttgaacccagaagtttgatattgcagtgagccatgatccagtgagccactgcactccaacccgggtaatggagcaagatcctatctcaaaaaaaaggaagttgtttcaattatattttttgtcatctcctccttcccccatggttgagtgaatactagaaacatgaatcctttttgttcagaccagatgttctttaagagttcttttctagctgtatgatccatgatctttaaggtgtcaagtatttgaaccatttgtgagtacagtgcttcttactttgctgggcacatttctgtgtactcttattataaactacacctcgttggcattttggagcaatgtaaacacttaattaacagtcaccttaggccagaagcaggagaagcaaagatagttgatggcatatttcagaagataggtccagactctcaagtattgaattgtgagacttcattttatgtttattaagttatcctttgacttttctttcccattgattttctttctgtttatgccaggtgaaatgagaggcttcatacagttctggcttgtatgctctgtgatttttgtagaaggtgaacattgggatggaagaggggaaaatcacttttcatgtttatatatgcatatatatggcttttcccctttttgagtaaatttgtacatgtcacacaactgcacttggagcacagggaatttgtacttttgtgtattgtgggtaaggaacaatgacatgtttcggggcttgtgtcatagctccgtcatgtctcattatttcaagtctgggtttaaagatcttgaggcaaatttctctgctgatggacttggtctgaagtaaactggattagtaaaatgaacaagcatagattattttattttattcccaccaccagtctcccagaggctgctttcagccacaacgcatatgaacaacctgcagccattctgcttgtgaagttcttagcatagatacttttaaaatgacttattaaggtcaatctctagtaactggaagtagataccagcattgactacttaaaattgacccaggtttaatagagtggctacctgcataattttaacatgttaaacaacttaatagtgtttagcaaagcttatttttaatttggctatgtttcattttatggtagaccaaggtacatagatttatagagtgctttcagtgttttgctgttgctgtttaggttaaaatgcaagagtaaacaagcaagaaggaataaaagttttaatttcagtttttttaataaagcaatatacatttactgaacaaaattgggaaagtgctggaaagtataactaagaaaacaaattctgcagtcctgtaattcgtatttgtattagttgagatattgacaggtataacattgtactatgctcttttcactttgcattacaaccgaacatcgtcctatggcaaagaaaggaatattaaagtaatttattagaagtggattataaaagtattgagcaaaacccaccactgttgactgtaatgatgtgaggtggagttgtctttatctccagtagcagtgtttgtgctaacttctgaatatacttttagtgcacaaaatacctcttcacaaattgaaggagaatttgagaaagattgagatgccatcttcttttactcaatttggacctatcctttcttcatcctaccctcagtatctgatttctgttgtctaagtaggaggggttttacttgcagcagactgagttcttgtgttacctcacctaatgttaaaagttaaggaaggtggggcatcagcaaggaagggaaagatgtttgtggtggagaatgggaaacccttgattgtagggtattttttattatttctgatagttacataatccattggactttttattcatttgaacrttggacatttactctctttgtgattataacgctaccgtgaacattctgcataaaattcagaatctgaattctaaatttttgtttttaggaaggatcgagatcgagaccgggatcgtgaagatcggtctaaagatcgagaccgagaacgtgatagaggagatagagagcgagagagggagaaagaaaaggagaaggagttgcgagcttcaacaaatgctatgcttatcagtgctggattaccacctttgaaagcttcccattcagctcactcaacccactcagcacattcaacrcattcwacacattctgctcattcaacgcatgccggacatkcaggtcacacgtcacttccacagtgcattaatccgttcaccaacttaccccatactcctcgatactatgatattctaaagaaacgtcttcagctccctgtttgggaatacaaggataggtttacagatattctggttagacatcagtcctttgtactggttggtgagactgggtctggtaaaacaacacaggtgagttattgtataccatggtacatatttcatttatgtttaagtttaccaaatgttgcatatttgattctggtggtcatttcccttgtctgtcctatagaacatcttgaagaatagctgatttgatgtttaattggcactctgaatttcagagtggaaatcctatagagaatacctctcccctgaatctaggggaaaatagtggtgctcgcttttcaaattttgttaccttatgtatggcagaggtattttgactcccggacagtacagatttagggacccacagtttgttttctggtacttgggtggagaaatcactggggtagatttttgtcgtttgtatttaatatggtattttgaaccatgcaaaaaatgaaatgccaaagtaatataaagtctataccggtgacttttgtccatctagtcgtcctccctcccatagaactaaacactgttactagtgtgttatttgtaatatagctaggatattttttaaacatggatgggctattattaactagacccctgttgatagacatttagactgtttcccatggttgttttgcatgggtcaagtgtttctgtaggaagcagaaattgctgggtcagaagatcatttgtaattgtgatacagaaagctggatagccttccagagggagcgtatcaatttacctttccatgagcatgtaggagaacacgtgggaaactattaaaacgtgaatttttacaaatccaataggtgaaaaattgcattctaatgtactttttaatttgcattttcttgctgtgggtgagaagtaactgtctttatacacttaagcctgaaccatcaattaaaaatttctggtttcaaaagtagcagtccctgatcattgtagaaactttgaaaaattcaggaaagtattgaagtgaattacctgtcttaccatgcagagattgaacataccgcatacacaatttatctttttctaaagttacatgtgcatggagacattttgaaggtactgtagcaaccaaaataggaagcttttattatagactgagccttagtaccattcttcttttcttttcttttttttttttttaatttttgtgttgttgttgagacagtctttcacccatgctggagtgcagtggtatgaacacagcgtcaacctcctgagctgaagcgatcctcctgcctcagcctcccaagtagctgggatcacaggcatatgccaccagtgcctggctaatttttaaataaaatttttgtagagttgaggttttgaactcctgagctaaagcaatcctcctgccttagccttgccaatttttcttttttaatgaaggaaaacttagaattgatgttagggtattcaaaaatcaccttacggaaattttaagaattttcaaactacaagaaagactgtaactctgaacttactatttaattgatatttgggtaaagccagacactgtatactttacatgtattagctcatttacgtttttctataaccctgcaggaagatattcatcaccactttacagatgagcaaaatgaggtttaagtttatgagaaacttaggtttagtggattgtcctgggttacatggattatggattttggtgggctcaatatttaaaactttgtaccttttgtctttatatctaaagttttatatttcatactgctattctgtggtctgrttatgggtagcctcatttcagagatgagtttattaatggttagtgtagaaggaggtcaggtcaactcaagatgaggtttgtgattatttggattaatatttaacttttagaggggtaattaagatacttggatactgaggattgcagcacatctgggggatttgaagggaaaccaaacagtttaaaaagtgaatttcattcaaatgtttcctagcatgctcttattaaactttgactcaaaccattaaagccagtctttttttggtgatttgttcttgtcagaaaaattctctaaacaaaatctaaagtaatgactttaacttttttttttttttttttttttttttttttttttttttgagacaaagtctcgctctgtcacccaagctggagtgcagtggtatgatcttggctttctgcaacctcctcctcctgggttcaagtgattctcctgcctcagcctcctgagtagctgggactacaagcgcgcaccaccatgcctggctatttttttttttttttgtatttttaatagagacagggtttcaccctgttggccaggctggtctctaaatcctgacctcaagttattggcctgtctgggcctcccaaagtgctgggattacaggcccaagccactgcaccgggccatgactttagcttttgacagacctacaataaagacatttcacattgctgcttagtagacacataactgcacatgaggaaggaattgaagctaggtcaaccaaagggacagtgtgagcaaggacacatgttgagctaagggaatgcaggtatgctctggctagaatacagagggtttgggaaggtggaggtggggcaggtgagactggaactgtaagttgagccttaatatatcttgtatagactggaagccatcagagctcttgaattgaagaggaatgatgaggattttttttaaaaaaaactcctgtctagtgaacatattgatgatacaccatgtaagagctcataacaaaagtttcgattctgtgaagggccttgggaatagaaaataaagaatggattggagtcaggatattaggaattacaagtattttggaggaaggtgagaaatggctttgcttttgaatgtgtgaatttgggataccaactaggtggaaatgaccgttagctctaagatgaaagctagagttaggattggcattgatgtattataggtagtattagaagttagaacatataagacttcacaggatattatgtaaaacaagaagactagaacaccgaggatcagttttaagatgccctcaagtggaggaagcaaagagctgaaaaggaggaatggctttagaataacttagacctggctgggtacagtggcccatgcctgtaatcctggcgctttgggatgctgaggcgggcagattacctgaggtcaggggtttgagaccagcctggccaatatggtgaaaccccatctctactaaaaatacagaaatcagctgggcgtggtggcgcacacctgtaatcccagctacttgggaggctgaggcaggagaatcacttgaaccctggaggtggaggttgcagtaagcctagattgcgcccctgcactccagcctgggcaacagagtgaaactccgtcttaaaagagaaaaacaaaaaagccggatccctggcttgaatacaccagtagcctacatatttcaggacctctttcttttcctaatgctgttttccttagaaatgtgaacagatgcattaactgactggttctccagctattgcctgggagttcttgaaagtccttgaaaccatttcagggatcctagaatttgtaaaaatacaaggaaacgcactcttctagctaagtttttttgtttgaaaagtagtcatttttatagaaagcgttattttgtgttaaaacagaatgagttttattgttaggaattaatattttagcaatttttcagttttaatttcttaacagtaaatttattagtagcttggcatcctcggtcattttcagagtgagtgcacaggggtcctgagagctgctaattgacttgttggtcttgtttttaaagtggaggtaagctgttgattttagcggagtgaattaaaaaatctgaacattcttggccaggcatggtggctcacgcctataatcccagcactttggaaggctgaggcgggtgcatcacctgaggtcaggagttcgacaccagcttgcccaacgtggtgaaaccctgtctctactaaaaatacaaaaaattagccaggcgtggtggcacgtgcctgtagtcccagctacttgggaggctgaagtaggagaatcgcttgaaccttggtggttacagtgagccaagattatgccactgcactccagcctggtcaacagagtgagattccatctcaaaaaacaaacaaaaaaacaaaagatctgaacattcttgccttgagaattttgaattaattttaaatatctttggttcaccagtgagtgaatttcactttctagatctttgaaagtacattttgcctttgtaaaagggttgccgaattgaggatatatcagtaagtaaggctttatagcctgactagaaaaccacttaaacctaggtctgtggatttacagaacccgatagatactacttctttagttatttttgttcatttaaagtgttttaaagatatatatgattttagagaatcagcataattaccctccctttcagatatttgttagtgacaagttacccccaattgcagaagcaacctaactaaaatgtaataatagtgcagccaccaatattccttatcagttttactgtactgatactgtgcagaaaactccatgtttcctgtagcattagagtttgataggcgtttggaagctttgatgtaaaccagttatgctcttctagcagtggatttccatataatatggtgagcacttacatttttcccatggttcttttccagttaagtgactggaaaactgtaaaattggggaatccattagcttatattgataatggaactgggggaaaatgtactgccgtcatggcaaccaatttaacttgtgcttgggggtcccccaaccctttggctgcccttaacgaagtggtgctgctctaggtcctgttaaatttgagactggcagttcttaaaattgattttaagatggtacctaaggtgctaccattgtgcatactgctcctgagggggaaaggataggattacaaaagagttgggtgctaagagttaggttctgctggcttataaaccaaatttgaattgaattaaataaaagtacagcttcagagttacaagggggtatgatttccacttgattttgcaactcaaattatgtaagaatttaaaagttacactttcttagaaacgtttgttataaagtagaatttgttgtaagttggattttttaaaattgcatagagaaatacttcatgatgggatagtcacactgtcgagtgtattcctgattgtgtctacccaacttgggtgtgtgtcatatcagtattacacataactgttccttggtttagagagcttgtgttgttacaagttttgaatcacaagtcttatagtcatttgcctaattggatttggttttaaatcattagaatgagataaagtgctttatgttacatatacttgatatgcaggcagaatagaattaatttaaatgtgaaattatttgatagattccacagtggtgtgtggagtacatgcgatcattaccaggacccaagagaggagttgcctgtacccaacccaggagagtggctgcaatgagtgtggctcagagagttgctgatgagatggatgtgatgttgggccaggaagttggttactccattcgatttgaagactgcagtagtgcaaaaaccattcttaagtaagtactatatctttaatgacrcttttagtcctctgcttgccattttctgctattagatagaagactttgctagtgcaggcttatgtcatccaaatttagaattatccaaagtaggccttcttagacttaccacatgaccttagtttaattatatattattggtaatctatagttacttggtagaaattgaagttcaaaggtcagattttagttacttggttctgcattttaggtgaaatgttactgatactgtaaaatgtgtggttttagtagacacaatggtgtatgacttaattgtgaaagaaaaggaaagtgatatgtcttacttagtaaaagataactgcttttagaaagaagaatgtacaggatgggatgtgatttatttaggggagaggggacttttaatgttaattatgcagctattaccgtgcatctgttataagctaaaaagaggaatcttttgttctgtaatacactgttagagctgcctctaggtccttgttcctctatagctatggtgcagataattgactactgtattgagctttctaatgttttaactctaccaactttttattgtcttatacttgcattctgcataagttatgatgtatgctacctgatgatgattctttctcaagtcttccctctggttgcttctgcttattctgtatttatgtgatatttaagtccttttaaatgtgacttgtttgagtggggctcagtggcatatgcctgtttattcccagccacttcgtaggctgaagcaggattattgcttgaggccaggagttcaaggctacagtgtgctctgatcatgcctgtgatagctactgcatttgaacctgagcaacatagcaagaccacatttcttttaaaaaaaaagaaaaatcatatctatgtgatcttctccctgaggtttttaaaaaccattttggagcgttgtgtaggcagtgatatgagtctttgttgtcagagtctttgttgtcagagagatatatagtgttaatgggataaatgaaacaagagtctctctttttttttttttttttttttttttgagatggagtctcactctgttgcccaggctggagtgcagtggcgccatctcggctctctgcaacctccgcctcccgggttcaagcgattctcctgcctcagcctctcaggtagctgggactataggtgtgcgccaccatgcctggctaactttttgtatctttagtagagttgtggtttcactatgttggccaggctggtctctaactcctgacctcatgatccgcccgcctcagcctcccacagtgctgggattacaggcgtgagccactacacccagccgcagaaattgaatagaataatgaactgcatgtgtttatcatcgacttttaactatttcagtcttatttatttcatatccaatcttaatttatttccctgtcccatgttatttcgaagcagtcttagataccaaataattatatatataaatatttcagtgtgtatctctgagatagtttcttaaaatagagctatcataacttaaaacaatttattggatcaaaatatccagttttcattcaacatttgtgtcagttttttctaattctttgatttatctcattttattagaactttttattcagcgtgatatttaatagcagttgaactttaaaatatttaaataagcttatccttatgactttatgggacatatttttggcttaaaccttaatcttcactgaataaattcttgtagttgttcagtgatacgttattgatcactggtaattacagtataattgacaataattgcataagcaaaatcatagctcattatgttgtattactttaaaatgcaggtaatgtcaaggacttgaggataataagggggagattttactcatctttaggaggaatatcattattctgacttgattcacattgcattgaatttttttggtaagccacagttgagaacagaatttggaaattgggatacaagaaagttatgcaatattggtgctgtgtgtatgtgtagtaggaagtgggtggaggataggctttcaaaagatgagtacctctgaaagattttggttcacttcatagggaatgacaagtaacagattttatagttcaaatgaagtatttttggcattgtgatttttttaatggagcattttctagaggttataactacttgtaaaagcttacttaagacagggtaagcttattggggtttcttctaggagctaacctggtgttgcctttaagtaatataagtaaaggagtgtattattacaataagttagcttaaaatttaaaaatttcaaatgtaactttgctatttgataggaagaacttaactaatgggaatgcttcattaaatgtagctcttatcatatatagatataaaatgcttatatatccattgtgtagccagggcgaactttaattttcactctagggtggtaaagaggctaacttaggcagattatgtttgaggagcacagaatttaaccatagtttgagagcattttagctaaataaagtatctttaaattgtccgcatatagattaagggtctataagatagtttcttcagtgtttgggatacctattcataaattttaggttatagatctgacactgtgctcttttcggaagattggatctggtataacttagtgcacactctgttagtctagccttaaatggctaccccatcccagtgaacaagtaagtttacaaagctgccactcctaaatggtttttatatttccttttttatgtgtttgcttgtccccatccttttcttctgaagcattctttttgcaacatacttactttcctgttttcttggagtggaaattatgaagaaaaaacccaaagagatacctaaagagcttaccagtcagggaacaatatattgctgtatttgtgactagtcagtgtaaaataccttgattcattttgatgtaaggaaggagaggttgttggcttctggtgtagcccttttgcagtggattttaagaagcatttgtctgtggttgtaactttttttttttttttttggagacggagtcttgctctgtcgcccaggctggagtgcagtggcacgatctcggctcactgcagcctccacctcgcgggttcaagccattctcctgcctcagcctcccaagtagctgagattacaggcccccgccaccacgcccagctaatttttgtatttttagtagagacggggtttcaccacattggccaggctggtctcaaactcctgaccttgtgatccgcccgcctcggcctcccaaagtgctgggattacaggcagccgccaccacgcccagcctggttgtaacatattttaattcaggaaatcaccttcagttttttgaaggagctgatannnnnnnnnnnnnnnnnnnnnnnnnnnnnnnnnnnnnnnnnnnnnntaataattgaagttgttaatttggtaggtaattttactgttattttaggtgatatgcttcctttttattttttcgtaagctgtaaaattagagatttttgtgttgaaggaatctaataatttgtacacataatgattagtcattcagtcagctaatagttaagtaccttctatgtgttgggcagtactaggtataatgaaaagtgaatctagtccctgttcttgttaaagcaaataaaaatgtaaataaaaagtttgacattgtgattaaccttctgaagtagaatatgggtgtttatatgaaagaatgatttgagaataagtttaggtgggaagatgttggatttatttatttatttttgagatagagtctcatctcatctgtcactcaggctggagtgcagtggtgccatctcggctcactgcaacctccacccgccgggttcaagcgattctcatgcctcaccctcccgagtagctgagattacaggcgtgtgccaccatgcccagctactttttgtatttttagtagagacagagtttcaccgtgttggccaggctggtctcaaactcctgacgtcaagtgatccacccacctcagcctcccaaagtgctgggattacaggcgtgagccactgctcccggccaggaagttggaatttaagtcaagggttgaatttaaagtagtggttagccagaacaggggttatgggatagggaattacagggcattgccatagcggattctttggtgcctctggaaacagctgactgaagcaccaactgtataaagactacttatgcagattccagagtgggtttccaacaagacaacttcgtttaaaaataccttgaggccaggagcagaggctcacacatgtagtcccaacactttgggaggctgaggcaggaggatcacttgagtccagggtgggtaacatagtgagaccctggctctccaaaaagatttatatattaaaaaaatgagccaggtgtggtggtatgtacctgtagtcccagctacttggatgaggtgagtggatcacttggacccaagagtttgagactgaggtgagctaggattgtgtcactgcgctccagcctgggtgacagagcaagactccatctctcttaaaaaaaaaaaaaaatggtggtttgtgaagagaatcaaaaggaaatagatcctagagcatagcctctagggtcagtgtctgagttgtcctagctctgcccacgtattagctgtgacattaactatgtgttaagtagccctcatgtgcttgtttctttttcaaaagatggagctggtactaactacctgatagggttgttctgagatcaggtatagttgtctgtgtacaactcttcgtcatttatggcactctgtttaggggtgcatcagtcagcattgctgattcttgctgctgttggtgatgatggtagatatccagttggagaaattattggatctttttaaccagttaacccagttagagagggactcaataaaaccaatttaataaagttccttttggcacaataattgaattacaattggggatgtaaacttaaaccttgacgtgacttgtcaccggaatgaatcaattcaagtattcttttagggctggaggtaaaggtgaaacagatgtggcactttaaggaccattaattatacaaacaattataaactaatttattgaacatctgttatgtggcagtcttggttctagttcatgtgtagcacataagttaggtaagggtaattttattggactcttaaaaagaggtgggaataaaggataaatgtggttatttaacactgaggcagtttctgccagaggactaaaaagttactgtggtcaccctagaagtagaattctattggcttttgctaattcctagaaagctaacttggtttgctgaggctctacatgttttgttaaatttgacctttgtacttaagtatttgtgaggattagatagagaaggctctctttgtttatacagtgccaatatcttaaaaaatattaagtagaacctacaccctacacattcattctagctttctgtgagttctgttgaggatgaaagaatattccctttaaaacttgtgaaaatttgaggaataggcaatatatttttagttgtctttattttctattgttaacttaggcattttttcgtgattaggtatctaactctgaaatacataccaaatgtattttagctgtttacactaacaaagctgtatggtttgattgtggtcttaaacatttcagctctctttaagagtccagggtttgatgtttcctttttgccctgtttgatgtattgaacattgaaacactgtagattctaaattattcaaaatatgttccctttccttgtgagcatttacatctagtagtttgttgtcattgtaaccagtattttgctatatgtagtgctattgtgattacagtaagttagtgttgctcatgttgtgtaatatggttgctaagaacataccagrttgaactagagcctgtctttgtttattccttcaccaataaaagaaacattatgtaaggactcggctaatatcactggctcttcactgacttggttggggaggggaaaactgtcaagccaataaaaggtgatttgaatgtatagagatttcacagaggaggaggtatttcatctgagttgagaaggacggagagactttgataggcagatggactagccagtagcaaatagtatcaatcctttcctgatactataggtagatgagctggtttctattaaggttgaagttctcacactgtcttaattgacagcacacgtaatatctcaataatttcttcgtagtaccccagacctaaagaaatatttcagaattccatttactaagtagttgggtcctaataacctaagtatttatgtttcttttaaaaaatactacacatacgttgaaagaaaaattatttcattcataaataaccaccattatttattaagtgtgttaatgctatttgatcactcacagtttctcaaaccttgataacagattgaacactacctcttttatttcctgttctatactgatgtttgcctcatgcttttttttttttttttttgagacggagtcttgctctgttccctaggctggagtgcagtggtgcagtcttggctcactgcaagctccgcctcccaggttcacaccattctcctgcctcagcctcccaagtagctgggactacagctgcccaccaccacgcccggctaatttttttttgtatttttagtagaaacgggtttcactgtgttagccaggatggtcttgatctcctgacctcgtgatccacccacctcggcctcccaaagtgctgggattacaggcgtgagccaccgtgcccagccttgcctcatactttttgaaacagcaactatcaaaagtctagcttccacaaatacgacatcaaaaggatttacggtctacttttgaaactctcagctaccttaaacttgtagttcctgggatgtcctacatgttgaacatggaaaatagtaaaaaaattatgttttaaatcattaaaatgagaacatacatattctaggtgatcatttaatgcatttacagatggaatcaacaacttactctaccatttgagtgatctgtttatacccaaaaaaagtagtttaatcttcttttggctgcatggacattaaggttgtaaacaagtccaggtgcagtggcttatgcctgtaatcccaatactttgggaggctgaggaaggaggattgcatgagtccaagagttccgggatgtagtgtgctagtttggcatccatatggtaactccttggagagcgggggactatcaggttgccccaggaggtgtgaaccggcccaggttggaaaatgagcaggtcaaagctgatcagtggtgggattgtatctgtgagtagccactgccttccagcctgggcaacatagcaaggccttgtctctttaaaatatatacatacatatatatgtatttcttatatatagattatatatatttctttatatgtatataaagataaacctgaaagatcagttgtaaatagaaaaattatacctggacatttaaatataagacctataggttcatttattgttaacattaatcaacaccattttgttgagtatgggttcatttgtttggaattccatttaattctaaagctggaatttaaactcaaacatttagaaaatacacaagttgtttttctggaatttaagacagttcaatcttttggaatgcttggtttctaggctcttttaaatctttcagaattgtctcacagatttgatagttctgtgtgtgtgaaagattcatcttgttctaaacttctgaaacatatgacttggtgttcatatatatgactcttttctatgcttggggtttatcatttcatgtcaactgtaattctcttgacccaactgatggagacaggattatgtgtatattacactatgttttataaagtgtatggctatcccaaggatttatgagttacatggaggctagttaagagtgtggtatagaaccgtttattgaatatttcccaagtgccaggcagttagtgtactgaggactttatatatgtacattgttttattttaaacaatttttaccctgttcacatttttacaaggggaccattacggaagaaattgtccaagatcagacaataataggaaaacagggacttaaacccagttttgtcttgcagcaagtatgtattcttaacctctgtgttttatttccttcatcattgttcctcatcgctccatgtaattctctgagtgtattgtaaagctttcctaggtaatatggagaacagtaaatctaattactcagattaaacagtgccattcatttataatagatgcctttttcaggttgctttatttatgcttttttaacttttaggttcaagggtatatgtgcaggtttgctgtataggtaaattgcatgttgtaggagtttggtgtacagatttttttttttttttttttttttttgagacagtgtctcactcttccaggctggagtgcagtgacccaatctcagctcgctgcagcctgtgcctcctgggttcaagcgattcgattctcttgcctcagcctcccaagtagctggggctacaggtgcacgccaccacgcctggtgaatttttgtattttttggtagagatgggatttccacatgttggccaggctggtcttgaactttgacctcaagtgattgacctgcttcggcctcccaaagtgctgggattacgggctggtgtacagattactttgttactcgggtaataagcatagttacctgacaggtagtttttctgattctctttctcttcccaccctccatcctctggtttgttgttcctttctttgtgtgcatatttactcaaagttgagctcccaactgagaacatgaggtatttggttttctgttcttgtgttagtttgcttaggatgatggcctttagcttcatatatgttgtcacaagaacatgatctcttttttatggctgcatagtattccattgtgtatatgtgctacttttaaaaatgaattctacttttaatggacatttaagttgattctatgtctttgctattgtggatagtactgcagtgaatatacacaggcctgtgtcattatggtagaagggtttatattctgtatacccaataatgggattgctgggtcaactggtaattctattataaatctttgagaagttgccaaactgctttccacaatggctgaactaatacaatcccaccagcagtggataagcattcccttttctctacaaccttgttattttttgactttttagtagccatgctgactggtataagatggtatctcattgtggttttaagttgctttatttttaatggctgcatagcatttgtgattgtaccttagtttacttaacaaattctattgatggaacctcatttgcagtttttgctattagaaacatttgctgtcctccgtatcctcttacaaacttgtacacacatttttttcacgcatacacatctgtgaaataaattccctacaagtgaaattgttcgggtcatagagtatacttgaattttatcagcttttggcagattgccctccatagagatttttatatactctcaccagtaaggaatcagtaaatgagcatctgtttctttacccttgccaactcagcattataaaactttttatctttgtcaatcttgttaagtgaaaaatgggattactttatggttttaatttgcatttattttctgtgaaattgaacatttttgtatattagccatttgtatttctttttggaatctgagactggtgcttttttcatcttctcaggatttctacctagttgatagctgtttttaaggtgctattttaaaatgcatcttagtttcagagaatttaaatttgaccaaatatgcggtattataaaattgatagaattagatgtttcatcatatgctttgcccatatttctatagtggattggcctttttcttatagatttgtaggagcttataacagaattagcaccttggatataagttgcaatttttgctcagtttgtcatacatttctttgctttatgacacttcatgctacatagagacttgaattttgtacacgtattgaattaaccacttttatgatgtccaggttttgcatcataccmtrcccagtgttggtttaaataatttaatccatgtattttactattttgtttttgttttaaacatttaaccaagctggaattttactggggagggatcataagctttgaggtagggatttctggttttcattttataaaaatgattttttgcctttcttaggcttagtttgtaattttttggaatgtttcataaaatatatatacatatatataaatacaaaaatataaataagtaatatatttgcaggatgtaatgttttaccatggtttgttcaaatcagaattagtgatgtgttaggtgtcgtcatcttgctgagatcatagttggcagttggcttgtagttatactacgccatctacatgtgcctgttgcaaaaaaatacttaagctaggttgatactgttcagtacatggggtttttggtatattttattaagcagtcacagttgaaaagctgaactgttacttactccaaggatgtttttgctactttagacatctttaggtaatctgcttcttgtttaatttgattaatttagactagtgtttcttaaactttagcaatcatcagaatcacttgaaaacttgttagagcagattgctatgcctcaccttcaaaatttctgattaagtagatctgagatgagactcaagttttgtagttcttactagttccaaggtgatgctaataaatttttaagagcatctctgccctaaaacagttggaaaacactgtagatagtaaggcacccagtaaagtgtggagtttggctatcctgtggcacttttattaattcatcattgaaacttcaaacttaaaattttactattgtgactcattccttagcctggataaatatttcattactactaagaaagttagtaaaacttgactcttacataaaggaaaatggactgtagtttttatctccagtgcctgattctgcctttcctgagttctgtgtcaagttagttttttgttgttaagcaaagggtttcatacatttaacagtatagcaaatcgtcaagtactgtttcttttttttttttttttttttttagtggcttaaaattgacaaattcattctctcacaattctgaaggtcagaagttcaaaaacagtatgttggcaggttagttccaactggaggctctaagtggcaatagtctttcatgattctctcctagcttttggtggtggctaacagtccttagcattccttggcttgtagctttgtaaccacagtctctgccttcatcttcacgtggctttccttttgtgttcaaatctccctctctttacattttgtaaggatactggtcattggatttagggcccactcttaaattcagggcgatcttgtctgaaatttataacttaattacttctgcaaagaccctatttctgagtaatgtcacgttgataggtaccagaggttaggacctgggcatatctttcgaatagctttttgctatgaaatttgtacgtacaatgggttcctttatctgggactttgtgaagagtgtgttaatgtaggagagacttaggactgggaatcagtacagtgatacctagtcttagtaactggttttgagagtctggaaaagttgactacggtttttttcgttttcttcactggaaaagaagtaaatttgactatatccttgagacctttgaaattttgaaatttcatttttcttgaaattattcattgtacaaacagcagtatcccatattaactggtgatgcaagaagtaattaagtgcagcacctcatggaatgggatcactgggtgatgatcagtattgaggaaccattgggaattgtctggatgatagaagttttggccatttaactaagtacttgcaatatgcatagttaataaagcacaataaaatatttccattaakctaatttataatatttatagtctgccatctgtaacatttcttcccttagaaaaataaaaaggaatgtctgttggttagctctgctccatattgtgattgattaaagcttgaggaatgtgaggagaaaaaagatcaaaataaagaaggtgacttttaaaactagttttaagaagttttcaacttaaagtcatattttatcatttctgtgacttttttctcaagtttttattgtctgaagttacaatgtgtctcacaatctactgaggtcttgtagttggtggcagtttggttattattgcctgtgaatgcttgaactcgatctagctgtacatattttcacctcaaataatgtgaattgttgggtctgtatatactgagagtatttgctaatttaaatgccttcagaaatattaaatattacactatgattccatgttgaaatgagcactgagtatcaagaggctgggaaatggagcaatagggtgtaaatatgctagtatttgagcaaatgttggaagagtaaccaatccttttttttttttttgccttgcaaatcaacagaccgctctattgaagctaagagaggtaactcacaaatagaggaagctgtatgttatgttctgctactgagatcatgtacaagagtattgcctctctcgtgtctgtgatatatcggaagacaggaaaaattaccaaacgtcctcagatcaaagaaatttcaaagcagctaagggctatagtgttgctgattcttgcactatgctttactgtctttaaggcactgagtcataatttaattggcagtgttttttctttcctggtcttacataaaataaccttatagctaatgctgtttgtccctcccaggaatgtggtagtttatttttaaaaatatgaccaaggacaagaagcataaagcatataaatgagttaagatggatttgtttgccaatagtttatgaaatttagaattaagtttaggtgaaataaagagaattcacttctttttgttgtacactatcaatttgctgaacttaatgctccagcagatggcatgagctaaaaatatccagttggtccatgaaagattaggttagactaatcataaaaagagccaaaatggtgaattcataaatgatggcttcagattttttaataccacttttaaatccgtaaataaaataatgggtttttatctaactggatgagctgtgacttaagcatctaaaggcatcctgtgttttgtccaggtgccaaaaggaagatagttgtttttcatagtgacatcagtaaccagtgtggaatggacaggagatagctgacccctgcaaagttatacaatcttgacccttgatctcattgccttcattcttacgtggcrcctgtcttgtgataactggagtccatattagcagccttcacttgagccatccctaactaagcctggtttccctttttggttcattgatcaatctgacgtcatttgtttttatcttccatttatgtatcagcatttgtttagtgttgatgctgcccctcagtcccacttcttttattattgaattccttttgtgctttaagattatttctttggggtgggaggactcacgctttcagcccttttgaaccaagagcctgttgttagcttattaagtaaggaattgttaaggcttaacaaaaaatgtttatttgcatgtggtaacattttagtggtgtgacatgaagcaacttaaaatggtttattagattttgcgtgttgaatatttgtatgtttttaaaaggtttaagaaattgaaaatgacgaattttgccttggcattcatgtgaaaccatgtgatcattatgttccataattggtcatatcatgtcttcccagtacatttcagtattacatttttcaagaattgatgaagcatatcttgtttcattgtatactcttaaaagattttcttgaaacttaattttgcaattgatcatgaaacagtagcacatttgtttggggcagaagtttatttttaatttaccttatgtctttgcatttcatttttgtcacgaagtttggttttaaaatgacctaacggaacctttaaccaacatgttctttggaatataggtatatgactgatgggatgttacttcgtgaagctatgaatgatcccctcctggagcgttatggtgtaataattcttgatgaggctcatgagaggacactggctacagatattctaatgggtgttctgaaggaagttgtaagacagagatcagatttaaaggtgaagtaatttcttctctccatttaactatatatgtgtgtatgtgggcataaaaatggggaatacatactgatcaataaccaactgtaagaaatcacctgtaaaagaaggaactagtaagtaccttcttgttttgtttctgctttgctgtgcyttcattttagactttatttctccccctttatagtaatgcatttttaagcccaatcttctcaatttgtaacccacctagttcttttataatctaataacatatatgtgtaactgtgctactcactctacccttcattaagtacagaggcttattttacttaaggatcaaatctttctccctcagatccatgtccttgtctcatcacaaacacccattgtaacttataatgctggagagtggaaataactatacacaggacaggcagctccttagaaatgtagtyacttaccctcgtgtattacttctttcctccataccacatgtaccttggcccctgttactgtattgattaagggcctaaaactattttctgacatttttgtcccccaragtctatgatgttcccctttttgctgtgttgtgtgtgtatactattcattggaatgtagactcatcccttgttgatacaagtgttatagaagggttcatagcctggtgacagagtgagactcttagcagaaacaaacaaacaaacaagggttcaacactggcaagaaagattctgggtctttagaaaaaaaactgaggcctgagcatgtttttgtttatacaaattagatcaatgctttaaaaaatatatttaaagaataatgtgagtactatcattatttattaaatttattgtgctaccaaggttttagtgagaacctgaaagtagaaattaagaactcttatgaaactttttatggaggaacctttttatatctggtccacttatttttttttttttgcattttctgttttttcctatttgcaaagttttgttttaataatggtagcaataattatactgcatattaatgttttcttttagcaatctgaattacatataattttataaaatctgattttaaggtattttatgaagaaatgctgtagtttgtgcatttattttttttctaaatttttaaaaatgtaaataacttttactatagttcagccattatgtatttgatttttcatttacagtttatttgaaggttttcatgggcatttttatagctgatatatgtagaatagtaaatattgctatactgtaagaccatgtaagaatccttgaagacagcttcaaataatttactgttttctttcaggttatagttatgagcgctactctagatgcaggaaaattccagatttactttgataactgtcctctcctaactattcctgggcgtacacatcctgttgagatcttctatactccagaaccagagagagattatcttgaagcagcaattcgaacagttatccagattcatatgtgtgaagaggaagagggagatcttcttcttttcttaactggtcaagaggtattgttttaattttcttcattatttagcttttgacatactgtttctaatatgcagcaaccttaatcataagaacatgttaatcatattttttatttcaatgttcttcaacctgattgtattaatatgtaaaatatataaccccttttatctgcatactgtaggaatacttctgtataccactagagtttgtgttataattattttaagagtgttaaatgcttttggaatttcaagattttgcaattgtagtttaagagatccctgggatataagtgctattatgctgaagcatgaatgtgcatcacagctgctttgaaatcaggttatcttcatcagtatttagcttgtgagtgaacttgggtgcctattcatcatcaaaacacttcagtttggttttgtcttcccatatgctcatgaaatttgggaaggattactaaaagttcttagttagaatttacttcatttaaaattttattctcagatgtagcatttcttttttttttcgagacggagtcttgcgctgtcgcccaggctgtagtgcagtggtgcagtcttggctcaccgcaagctccgccttctgggttcacgccattctcctgcctcagcctcccaagtagctgggactacaggtgcccgccaccacacccggctaattttttgtatttttagtagagacagggtttcaccgttttagccaggatggtctcaatctcctgacctcgtgatccactctcctcggcctcccaaagtgctgggattacaggcgtgagccatcgcacccggccagatgtagcgtttctaagcttcttttcaatagggtgtttataggtgtgctgtggaatacctgagtggctaaataaattcagaagctatttggataatacaaagttttaaaaagccttttacgaaagggtttttctttttctttttgggggtggggagggaagacagagtcgcgctctgtcaaccaggctggagcgcagtggcatgattatcggctcactgcaacctctgcctcccgggttcaagcgattctcttgcctcagcctcccaagtagctgggatcacaggtgcccaccatcacacctggctaatttttttttaatttttagtagagacggggtttcactatgttggccaggctagtctcgaactcctgacctcaggtgatctgcccttctcgggttcccaaagtgctgggattataggcgcgagccaccacacctggccccaaaatgcttttttgatggcatataaacagcatttgtgctgtaatgtagtattgaggctgttgggataatcgttttgtcctcttgtgtctggtctctagtttctcatttcctccaaagtgcatagtatatttttatttttatttattttgttttattatttatttatttgagatggagttttgctcttgttgcccaggctggagtgcagtggcgcgatctcggctcaccgcaacctctgcctcccaggttcaggtgattctcctgcctcagccttccgagtagctgggattacaggcatgcgccaccatgcccaactaattggtatttttggtagagatggggtttctccgtgttggtcaggctggtcttgaactcccaacttcaggtgatccacccgcctcggcctcccaaagtgctgggattacaggcgtgagccactgcacctggccatatttttattttttaaatcactatttaaaattgtcatcattctcagataacataagcgtattgagattctatcagaaatatcaaatggcctcatggttaaggacccgaaaggtttttctctgagacaactttgtgcggtattttctgtgaatcccacagctggggaaaggaagggagtaagccgaagggttttcagatgtatgctagagtgtctttcatgaaataaaatgctgctctagttgtcagctgtttttttgcataccattgcttctttaagttatctttagattcccagtcttgaatttgaagagttttggggagaaggtagcagaaaacctaacgttttgtttacatttcatttgttgtatttagtagtagagctggtctaaagtaaatattaccttctcatttttgtgaaccttcattatttttacttggtaagttaaatgcaactgcgaaatcagtactcctttcttcataaatttgaatagcctccatgaaattgagtaatctcataaaaatttaaaactggtttttaagaacatattctgaccactaaataaaagtgcttctgtagtyacatgagttaatttgggagggagagagaacagtttaaagtgttgcctagatagtaattagataagagtgattgtaattaaataattttatttttaattttgcttagtaaatttttttttcaacatgcagtgagttaattggtaaggtccagattaatttactaacatattgctgcttttggagttaaaaatcttttctcaaatcaaaaactcctgaactgtctgtctttattctcagtattgctaatgactaagcagatggctgctgttgaaacttcttttcctccactacctgtttctgtttatattctgatgaatgcagataagttttgtggcattctcagctgatagtgttgacttcttggaagtttggcaaacctcagggaaaatttttattgcaagttttaaagctgtttaggactttatctaaaaacttaagtgttacgggatttcttccacattttagagatgcctttatatcctacatagtcatcattttgttttagctccttgcatacttagcagattgggtagtctaatctccagtaaagttggaattgtcattttaaaatactggaatcacaaagcaaatgtctaatttaagcacttaatttttaatgtgtgaaatctggatattttgtgatttctgagcatttatttttcatttatrtacagtaaaattaacaaaattgcagatactcttaaatgttggaatcctagttttatattatgttcaaatgttttttaagttggagagctcttaattttttatttgcatgccagcagggggcattctaatctagatacaacatttgaaagcagtattttcaaaaaatatttgttcgctttgttatattttttatttagatgaatagcatctactttcattttcttttagaaacttgagatttcaaaggaggatctagtaacattgaatctttaatagttttctgtgtcacaatttttgagacagataacctttaaaaaaaactgatgtgtttgaaataagtgaaaagtaatttatttgttcttactgtgtttaagaacgttgtgttttttgatatagagacacagttggacattaaaaaaatataaagtaaatgtcctaaaattcttcckcaccgtttagtatcattgtcctttgaaaaaaacacgcactttgttgacaagggtagcttctgattgggtcatttattggacaggctgcctagtgtataataagcgttttacatacttctgggtttaattgaattaatacttcaataaaatttagaatacatttgtccgcagtgctgccttccatttttaagttcctttgcctctcccagagctatcatacataatctgtctctctctttttttccgtcttgatattcattatgtctcctcttgaatgcacatgtgttagaatatagtcatgtgccacataacaacgttttggtcaagacaaacttctcagatagctgtggtgctgctcccgtaagattatagtggagctgaacgtaaccttgcagcatcacagcacaacacattactcactgctttgtgatgatgctagttcaaacaaacctactttgctgccagttgttttaaaagtactatatagtatgtacaattatgtccagtacataataataatgataataggacattgttagtggtttttgtatttactatactacatgttttatcattattttagagtgttctccttcgacttaaaaatgttaactgtaaaacaggcttaggcaggtccttcaggaggtgttctaggagaaggcattgttatcacaggagatgacagctccatgtgtgttactggcctttggagaccttccagtgggttaatacgttaaggtggaagatagtgatattgatgatcctgaccctgtgggggcctaggttaagtgtgtgtttgtgtcttttaaccaaaaagtttaataagttgaaaaagtaaaaaattttaaattggaatgaagcttatagaataaggatataaagagaaaatacttttgcacagccatacggtgtgtttgtgttttaagctaagtgttactacacaagagtcagagttaaaatttagaagtttataaagttaaaaagttgtagtaagctaaggttaatttaatgaagaaagaaaaatatatcaaaaaaaagaaaatacatttttttataaattttgtatcgccaaaatgtacagtgtttatgaagtctacagttctgtacagaatgtcctaggccatcacattcactaagtactcactcactcacagcaactttcagtcctgcagacttctttcatggcagatgccctatatgagtgtactgatttttaccgtttttttttttttttttttttttttgagacggagtttccctctttttgcccaggctggagtgcaatggtgcaatctcggcttattgcaacctcctgcgtcccgggttcaagcgattctcccgcctcagcctcccgagtagctgggattacaggcatgtgccaccacgcccagctaattttgtatttttagtagagacggggtttctccatgttggtcagggtggtctcgaactcccaacctcaggtgatccgcccacctcggcctcccaaagtgctgggattacaggtgtgagccactgtgcctggcggtttttatcttttataccatatttttgccatgccttttgtttagatgaacaaacacttcccattgtgttacagttgcctactgttattcacttcaataacatgctcctcaggtttgtagcctagggagcaataggctatacagtttaggttcgtgaatacactagaatgtttacacaacaacagaatcgcctaacaaatttctcagaacatattcctgtcagtaagcaacgtgtgactgtagttttctgagaaaaaaatttgtagctgcctaagacatttgggttagcctagttcttaaatatctgtgttgatactgtaaaggtgtttgttctcattaggcacaatgaagcaaatcttccatataattgcattagtgatacgtgacattaaagcctaattggcttatttaaaatgtctagcacatcaatttcttttagattgtgaaaattgaaaaggtcgtgagtgcatttaaatattcctgagtgagaaatttcaattttagtacaatttgttgagaattaattaggaaatctgactctaagaaaaggggtgtggaatgcaaataaggcagttatatattcatttgaatacaaaaatgaaagtttcttggattgttttggaaatcccattgaaatttgctaaattagttttggttactaaattgaaaacagggtatccatgaagtgaaagaagatggcatacataaaacagactgcatagaactaggattataataaatactttaaaatgtttcagtattcgtttttagactcacttttattttgtaggaaattgatgaagcctgtaagagaataaagcgtgaagttgatgatttgggccctgaagttggtgayattaaaatcattccattgtattctacacttccacctcagcagcagcaacgcatttttgagcctccacctcccaaaaaacagaatggagcaattggaagaaaggtaacattagaaatgctctttataaatatttcactaataatgatttwtgagatataaactgtattcagttataaaggactaagttatgggtgattgtgatctaggttttatacaacaaaataatatccatttgtagggttccgcatatctcttgaccctaaagtaagaatgagtactgcttcttctaggtagtgcctccttagcaaatggaagattagttaggatgggttaagaaaggatgttggccaagtactgtcttttctcctattaaatcacttgttataaagtaagcactttttctttggtgccttggccttctgcccataattttgtttaaggcttcccaaatgtaatgtctataggtgtgaaatgttgaccctgtgcagacctctaataacagtagcactgatctggcccgggcgtggcggnnnnnnnnnnnnnnnnnnnnnnnnnnnnnnnnnnnnnnnnnnnnnnnnnnnnnnnnnnnnnnnnnnnnnnnnnnnnnnnnnnnnnnnnnnnnnnnnnnnnnnnnnnnnnnnnnnnnnnnnnnnnnnnnnnnnnnnnnnnnnnnnnnnnnnnnnnnnnnnnnnnnnnnnnnnnnnnnnnnnnnnnnnnnnnnnnnnnnnnnnnnnnnnnnnnnnnnnnnnnnnnnnnnnnnnnnnnnnnnnnnnnnnnnnnnnnnnnnnnnnnnnnnnnnnnnnnnnnnnnnnnnnnnnnnnnnnnnnnnnnnnnnnnnnnnnnnnnnnnnnnnnnnnnnnnnnnnnnnnnnnnnnnnnnnnnnnnnnnnnnnnnnnnnnnnnnnnnnnnnnnnnnnnnnnnnnnnnnnnccccatcagcagatatatagtccccatcagcagatagatatagatatagatatagatatatatatatatatatatatatatatatatatatccatccatagagagagagagagagagagagagacatatatgtcttaaatatttatataataagttaatgcatcctccaggcaaagctttaatttttttttttttttaaacaacatggggtctcactatgttgccagggctggtcttaaactcctgggttcaatcagtcccccctcctgggcctcccaaagtgctaggactacaggcattagccactacgcccagccctcagcctgcctagttttcatttgtcttgaaatcatgtgtactttgtatatctgtatttgttttatttttaaaacgttgtgtttgtttaccattgagtgaaactggtgtacaacaaagatgtcctgtttgtgcatccttttgtgtacttctcgtttcattgagttcttctttgagatatatgggcccatatttactacagttacacatctgagctcttgctgtcgttgaagtaaattaaagtttttgtttctgttttgctttttgtgttttaaatccttaggatgctgaggagaattttgtcttactgaaaagagtgactcagcagtggctggatatgtgatgatggccacagctggtgatgggctcactctgaggactgatcatgagcttataattcaaaactaggggctatattgccactttgccatccagtgatggtgtttcagccgaaactgtaggacctcttgctgggaaatcatgttatccttgccttgagtcaatttcatcttagaggttgagaaaagcactgatgtagcttccctggacagtcctagggagagtaaaggaagacttccttggcagttgctgcatcattttcattatgaggaagaamattctgaggcgcagcatgttaagcacaaatttaaagttttcatacaagcctggcttatagaggagggatctatacaagttttactgttcatatgtaattttaaacttactgtttgtgtctaattgtgaaaaaatatttgatttttttgttaaactgttctartataaggatagtagctagcataaagcaaatatataaaagttgaaagtttttgaacaaatataatacttaatacaaattttaatttccatcaaattaattgtgattctgtataactttatatttgagtcccttttataaggcagtgccatttcttatttctctattagtttatgaaaaatagattttataacttgattgtggtactaataaaaaacagccttttaaacatgttacagcactaatggtgaacgatttcaagtttttagcaatcaagaaaggttgagaatgcaacatatatttatatgagggtaaatatttttacctcttgataatttttgaagtttattcaagtatttgactaagttaaaagttacagtaattctttacatgcattcaagtttactcttcagtagataacttctgcattttttgactgagacttaaaattgctattttgtggatttggttgttattaaaatacaactataattattttttaaatatttagtgttcattaattttgttcatacaaatagctgacttttctatagttgatcctacatttcgctgattaatatggttcagagcatacattgctcagtgaaaaagagaaatggcccttgtggagatggtcctgtagttttaaagaaagacttaatgatccaggatctgaagatagcttactgtggtgctgctgggatgtttataagcaaataagttgatgtccttgtgttggagaccaccacagagttccctggggactaaaagtccaaattagtttaaatgcattattgtgtccagacagtattcaggtagggcaaatgaagtactgcgagttctactttgaagtggagttattgggggcggagtggggggaagtggttctattagaaaaaaagtgagttctattagaaggcaggttattgagggaggaaaatttactcttagcatgtcctgacagtgatgccaagcttttcaccatagggtctgttccatattagtcaatgcggtttgaacactttttaaggctctttgaacgcttactgcagtgttgcagtctagaaagcatgtaacaattatattgattcttactggtcataatgtaaatccctcgacaaattcaaggtcattttgtctcctgatgggttcctggttgtatggtgtgccatttacaattagaacatggttagggcttgcctcactcaactgctgaagtaccaaagaagcttttatcttgtcatttattagttygcttttgcattgtgtgtgtgtgtatttagccttagctatttttagtccttgagaaaggcctaaaacttgtgcttttttgttaaggactcaatttaacacttgtattttagggtttgacttttggctggcaataggctcttactaatatcaataatgacgagggtttgccaagttggcataaatcatttgattcttaaacacttgcagaatcatgtatccgcgaattgttaagtattacagaatttaatacactcacccagacaaaaaacatacacacaggatgaaattattttgtggagaaaaattaactttttataatggtaactaaagagttggtcacatgagaaatttttatcacattgtattatgttatagaagaaatatgtgaaatgtattttttcccagaacaacttttttaaaagtgattttcttcataaatattttcagaactatggttttcaccccagaattccagaaagccagaagacgtcttctgtatttacaggcatgtarttggttctgtatagatttgagatagggtctcagtctgttgcctagggtggagttctgtgccatgatcatagctcactgcaacctgaacctcctggactcaagcagtcctcccaccttagcctcctcggtagctgggactacaagcatgtgccaccatgcctggctaatttcttttatttttttgtagaggtggggttttactatgttgtccaggcttgtctcaaactcctggactcaaataatcctccttggcctttttaagtgctgggattacggatgtgagccaccatgcctggcctattctgtatagtttatagagcatttccacatccttacataatttattccctacaaccctgtgttatgtagactaagtaatatgcaagttataaaaggaatacaagcttgggggtgttaaaacctttccagttactttagccactcaggtttgattgctaggtctgccagttacctctaaattcatcgcttctttaactacaagaaactgactttctagaatattaaatgccggttatgcttattcaagtttcacctgttaaccttatgtatgtcgttgtttgcttcagttctagttgctgattatttttctaaatgtcctgaagaatgtatttcagcaacatcatcaaaccacatgtggtttcttattcctttgctagttgtcagtcttttcaactgacaaaaggaaacattttggtttttgacttgtaaattattctgaaataccctcttggtagattgctattatgtttttaaatccctgaggtttcctgttagtattttgggaagtctactacttagtaaatatgaaatcagaaaatgaaagtgttaatattaagtaaaatagttaatgcagcaaaagcctatgatttttaaagctatttgatttataaaattaagtgtttttaaaataaaatagggataaatataaatcttttcattttttgtatgtgcccataggcatttctcccacatgtgtttttttaagatggaactttagtgctagtgctgtttccttctctcatgagtaggtcttaaccttaccgtcaaggactgtcctaaatgctattatttttcagtaaagcttttcttgactttgctatggaagtaaacctttttaaatttcacagtgtgtctttggtgccactcacactttctatccatgtctaatcatcccttacaaatggtaaaagcagactctgtttgattcatcttctgtatcaattgcttgcatatacagacatcttcaacttaatatcagtaacctgttcctgaaaatcatgtcctgagttaaaatactaatgaggaatccccatttcccattgtttaaaaaaaarttatatgtaacatgtatttcccaagtccttaactaattttctaaaacatatgtaatatatagtaaaacatgcacgtataccaaacaagctatcatattagtatgtaaatgctttaaacattttccgtcaataaagaattatagttcttaacagttgctttgtatgtagtaacgtattacatgtcatcccgttgagaccatgcacttaccgaaatatttacatttgattctgctgatctgtccattcttactggattataacttgagtttttttccatgtggcattttgtttaaaatgttgagttgaattttggtgatataaataacgaagttttcatttgtaaatattgcccaaaaacattgaaatatacacttgtggaaatttgaatactaattataagggctgttttatcagacgttttgtaaggcacgttatattgcttcatcagtatttttctttttatgctgtccattaatttgattaagcaaaatgtaatgcggttgagtgataacctgaagtaatagctttgttgagaaagaagttgctgttgtggtgtaaacaaaattttggttccttaaatattaatttacctttttaaagcattggccattgaagatcaaatgatatttctagtttatttgctggcttgaaattccttgtgtcagtgaaagttagtggctgatctttaacagtcctgttaattttatttgatatgtaatataatttatatactctatttcttaacaggtagttgtgtcaactaacatagcagagacgtctttgacaatagatggtgtggtgtttgtgattgatcctggatttgcgaaacagaaggtacrtatttagtggatactttataaattagagttggtttaacagtacttacaaccaattcatttaatggctaaaatttacctttcagaattattttcctatctttttttttatttgcaaatttctgctgtatgaacccwttatgttttggctggctctcagaaattaagacagtatttaatatgtaattctaggcttttttttcttttagagttgctttgstttctttgtttcagtgtagtgacggtgggtgttttggcttgtatattcatttaacagtatgggtttagtaataaagtacaggatttctatccctgcagttcagtcacttctcccaacattattagagttactgctgtcaactaggcacactatttgaaaacagtactatgttactcctctagtttaacagtgctgtatactaaatgaagtgaaatgcaggtgaagtggctattcaataaatacgttttatttttcaaatatcttttggataaattgattacattttgttattgatggaaattttttcattaaacagtaacagagtaatagtactcagaccgtcgagttttgaaagtgaaggtttcttttcgggcagaatccttgactgcccagcatataaaaagcaaggaacaaggtcagcctgatagaactgaaattaggaggagtaaggattatataagctgtgtgtttgacaagaagtttttcatgttagagtctttcagatgatcgaattagaatgtctgaaagaactttaaggttcaggatggtgggttgtctattgtagcagcatgatttatggctatcgatatttctttatttattttggaattaactgtgggctttggatacttctgttgcatcacaattttgtgtttgactgaagaaagactcttgtgttatttcaattccaataggtctacaatcctcgaatcagagttgagtcccttttggtgacagctattagtaaagcttcagctcagcaaagggctggtcgagctggacgtaccagacctggaaaatgcttcagactttacacagagaaagcttataaaacagaaatgcaggtatggggtattgtcgtttcctgccgatatgtttaaaatgttaggttgaattatcttaccagaagaacattgccttatttacttaatcttgccttttaggattaaaagctccttagcttttccaggagtgaaatgtatggtgtaattaacttagatagtcgtacacccccttattccaggctgatacattccaagaccctccccctcccacgcctaaaaactggaatatgctgaaccttacttacatatactatgtataaatatctttctttacaatttcactgataraagatgcattctttctttagatgtgatttttttgctcttttgttactaggtttcaactttttttctttccttactaactttcagcgtttcacttaaaggaagcacttcagggcctctcattggcatatccaaattgccagcatcaatattcttggcgctttggggccattattaagtaaaaggttacttgagcacaagcactgtgatactgcaaaagttgatctaataacagatggttgctaagtgacaaatgggtgtatagtgtatatagcatactactaagaatggtgcacaatttaaacttgatgaattttttctggaatctttaaaatttttyctgttgacactgcttaactgaaaccatggaaattgcgagttcagatgagtgaagactactatacgaatttctttctgcagttgcgagttttatggacagtagcaaacactgaatactataaagatagttggagaaaaatggtttctctctagtctagcctacaagtatttatctctactgagacagtgtagaagtaatgccaaaacaaatagctcaggaggcagcagatttttgttttctggaacgaggagactgaggcatttttaacataaccaataaatgtttttgttctttgctaggataacacctatcctgagattttgcgttctaatttaggatcagttgtgttacaattgaagaaacttggtattgatgacttggtacattttgattttatggatccaccaggtatgacttatcaaaacacatttttatcagatcttttaaccaaaattgactcttagtgtttttctccatcctatttaatatatgtattaaatacattttgctttttccatccagtatgcatcaagattaagtcttacatgatagcattaaaactaaaaaaggtgacagttatatgagcacatttttttttttcttcaaaagttattatgggggggtttgggtaaattgaattatcctctgggcatgaaaatgtgagaattcctaagttttctttggggaaaaacagtttgataaacacattgatgaattagcaattatttaatgtatttcggaagaagacagttttgcctacaggaaaattttgcaatgtttttatgattcattgtttgctagatctgtataattgaattggatgacagtttgagtttgagtttggtccactgcaaaatgaaaaatgagattgcttataatagtttgtactttgtcacatttttgcttgcttaaggcaccgtgtctaatagattgtcttttaccactagctcctgaaactctgatgagagccctggaacttttgaattacctggctgctttaaatgatgatggagatctgactgaattgggatccatgatggcagagtttcctctagatccacagctcgcaaaaatggttattgcaagttgtgactacaactgttctaatgaggtcctatctattactgctatgttgtcaggtaatagagggaaaggaacaaaaaaaagcccagctcttcaaagtttgggtggacttcacttttgtttttgttttttaatttttagtatgatagtggattttatagatsgttttaaggaattaattttgttttctaaataccttgtaaatagcttcgtaatgacatagtgcttacaaaagtaaagtaagtcattgtgcacaaaagataagtaaagcattggctctcttgagtgctaataaaaattgcagtaagtttgagcacagttgtaactgaattctttggttaaaggtccatcactgctatctttgtggtttttttgttttttgttttttactgcaagtacaggaagaactttgctctagtacttagctctattaagtgtgcctgtgacaaactgaaagctatacattaagttgagccttttctatatatgtactccaatggcacccgaacaaacatgaatttcaaacttcatatcaagtaaatagaaatagtaatgtataattttaggcttaaaatctaatctgataatggtattcttttacaatggtagaaaaacttggtaaaagaaacatacctaatatataaaatcgctaattttgtaaaattggaccattaagctaaggaaataatgctgtttttagtaacaataaaatgtaatccacaaatgaatagtaacttggaaattagattttccctaaaggagaagaaatattgttaagaaacaaatgaatagctattcttacagctaaaaatagaaaataagttcttactgacgatyaaaatattctctgctactagttttagcacgggagagaactgactccctattgctgagtggtttattgaacttaatgctgcaaatatttcaaaatattctgtggaattaaaggataaattgaaaaaaatttaaatgtaaaattatggcttagtttagacgtatggtatattctaatggtgtgaattttttatttaagaagtagctaaaatgttttcttgcagagttatgactgatcagactcagagcagatgggcagggcagtattgagtcactttaattaaattgtagcttcatttgcggaggtggtggtaggttgttgtctgcctttcttatatgttgttttatagattctcccagttgtacttctcccaagattttagtttttagagaaagtgtggggcaagaactaatggattgtgtacttacttgtctatctgcctagtttttatttctctaggttctcttatcagatatacttacatgattactgttgtttgagtttagaatattagctctttaagaagtttgttgttgtgatgtagttgtaatcttccaactacatctcagttttatttgtaattaaaaaaaacttatttttatttattacaaataaaaacctttagtttgtcaggmgaatgagcatttatgtgcagcaatgtaaatggactgtttttaaatggtccatttataggaaaagtgttgaaataagaggcaagtaagaagtcagggaataaaaaatagtttgctgagcttgtaatgctttgtttgacattaaaatagtttttgaagttttgaggtcctgatactaacagtgcaaatctagaggcctttgagagcactacttatttattcccacttaactctagtggctagttcacattaaaattcacagctgtgagaagtttgtgtgcttttatgaattaccttgcttcaattaaattaagcaagagttttaatatttattatgatcatgttttgttgtcactatttggctattttggcatctttttaaaggggaaactgtatgggaaagagtaatatgatactgtattttatcttgttgttgattattcccattatcttctatccgaaccgataatttatgaattttttcattgacaaggttttaagagcttttaaaatgtgttgaaaaagtcccaagctgttaagtatttttattttcatactgcttttatgactatggaattgctaaactgaattaaggaaagttgtatttcaaaaaatgtagtacatgctttgtaacaatttaaagttttatgtgaattaatattgaggctctaaacaaataactgtagttacatatcttgatgacccttgatatgattgtttcagactaattgtcaacttttgaaatattggactttgcttttatattgaggttttgattcaaataagtttgttttttttcttttttaaatttgggactttattttctaatccttttgttaaaatgctgaaacactaggctgaatatcccagcctttttgaattttcttaattcaaaggcggtttaaccttccaccactactgctatcatccaaacccaagaattcttgatatttttatgtttacatatgcttctgctcaccggtgctaatagtgatacccaccagttggtaatagccacagtattagggaaaaaattctgatagaaacatggcagtagactggtttcaaagttgttgttagctctgcagtgggcaagcatagcttcctaactttcacagccattcagtagatttagtggatgcccttttgaaaaattacagttagctaaaaggcaattgacaccgttattctggttattggtagagctatcagcactggtttttttaaataagttgagctttttagtatcctgatggccttcagaatagctgttttgatgcctacttttagatctagttaaaataatcaggtactctgtagctttgaaaccctcttgtcttacagatgtggttaggtgttgatgtaccaaatcaaggtagtaaacaatccaagatgcagttggaggccatcctgccctgccctatgctctgtgaactgacctagctaggccttgttcctctatctgtgaatgcgtgactcatcgatatgggcgtttgtgttgggcccataccaaccttgtttagtcccacagtgttttgttcgccccacggaggccaagaaagccgcagatgaggccaagatgagatttgcccacatagatggagatcatctgacactgctgaacgtctaccatgcttttaaacaaagtaagtgtaaatttgattggagacactcttgtctaaatgtcacttgcagtgtataagatgtttctttgtcccactttgatttattatccgtgacaacttayattagaaacccagaggtacttttgaaaaactcctgacgagcatttaaaatagaaattgccaatctttttcaaagttgtttatgtttataatcaggggataaagcaccaattgtagaaaacctgaaaaataacagtgataaaaatgacagacttgtataacatgtatcactaacatacacgtttttatatacttttatttctgtgcattttacatttttaagaatagttttatattgtttatacaatcattactctaacatttttactaataaagaactttttacaccaaaataaaactaatagaaaaaaatggacaagtatgaatgatggttcttaggctaccagtggtctctaaacatgatatggaaaagttcagctctactgttagcccaagaagtgcattattattttggcattattattgataatgaaaggcattaccattttctcacataaaatttgcagatattgaaaaatattccttagctgtatgggagtggggttagttgtggtctttatgaaaagttgattttatgttaccaggaactttagcaactgtatactctttgacccagaaataatttagaaagttattttttggtattctgtggacactgatttgattaaataatttcaccagaattatttatgggggtaaaaaaaaaattggctacctaaatgcccaccagtggaaaaattgtgagttatgctgtagacatatgaagtaattgttctagctttaaatcatcttatcatagaatatttagtgacctgaaaaacatttgtcagtgacttgtaaatgaggaaacataataacaatgaagttattgctagctgctgctgttggaatgtaccatttgcaaaaattgagaggaaaccttaataaatttaaaggagaaaaaaaatacagaaattgcaactggatctgacattttttttttaactgatagccctacatcatcaccctgtgccaaaaatgtggaattctgtcactaagtttgtagtttcttctcatgagaaattggtttcttaatttataaagttgacgttccaattttgtatgtctggttttatttgtaactcatttttattatctcataaacatctcagttatactcttaaaatggggagcctgttgactttggcacatctctgtaggggtgatggtgaatttatttgtcttggggtccagaagtgctagagggccagtgtgtgcaccagacgtagtacctaacttgatttacatctgttccttactccagaaccctgatatgagttgaaaagaattgatgactagcagtgagaaagaatggagcccttctctgcccaggcccagaaaacttgggggcagatatgagagttaagggaaatgtggttatgaaaccacaggctgaagaccagcacatggtttaccttagaacagttatttaatctttcttgtatccaaatactggtattacctagcgttaaagacttacccctgattagacagatctactcaaaaaacctactgtattcctcttctatgcgaaacatgctgggtgaccaagagatacataacctattaaagccttgagaaggaacagattcagtcagaggggatgtagtaagttaaaatggtgttatccactcactagatgtatgacctatttctgataaatacatcaaaatactactttctacatcaaaatacaactaataaaatagaaaaacggacaagtatgaatgatggttcttaggctacaagtggcctgtaaacaagaggtggaaaagttcaagtctattgtttgcccaagaaatgcattattagtgagaggtactatgatctctcactgccaaagggatgattagccattggtggtttttaggggtttgcagtatgtgatgacttgacatttggtagagctgtccttattagttaaaggtgaggatttagcctttaatcactgattgccaccttttcaaataagagaagctcttaaaaaaaaaaaaagcaaaaaactttgccagatccccacgtgttattatttcgatatatccatatatatatggatatgaaaatatttggaatattttcacgaaagctttttaaatggttgtatgttattaattgaaacattgagtatatttgaaaaaagcgtgtttcagatactggtcaagatgttttgcattagagacaatagttgattacatagtgaagctaaaatgtcatgtcaattaaaatgttgtcttaatactatttatgtaaataaccctttgaaatcgaaaactagattcaagttattttgcagtaccttgatctgtctagggaggggagatttctctctaaaaatcagacaaatggtttggctttagatcttaggggtgrtttactgtattggtgagagataaacagctagaattatattaatgttyccagttttagatttaattttcccatttacccaattatttctcacaagtttagaaatacagtagaaccatcagatgttagttactagtcatttgttcttaacaaataacttagatttgcaatttttccatctgtagtacatgaattctaaaaattgagaaccacacaaaaaagctacatttcaagccatagtctgcaaatcaacaaccttttcaaaaatttgcctttttattgtccagcttgggcatttttctgcctttcagcttgttacagagcatcagcataagtaaaattacctctaaggtgtgctgtttcagctcccaaagatattcagtgctttgatttaaatgtcaatggcttcagatggttaacttttatttctcattccagrtggattaattaatgggtgttctaatatgttattgtattctttaattcaaaaatctatttcctatctccacctcacccatccttaatttctgaaatggggatgcattttgtaatggataaaaatgtacttatatatttgttatgtctaaaaaacattaaggcagagttatacactataactggtagaatcctagaaccaaagagaaaagagtatgctgaagataagcatacatcacagtagcaagagaaggatcaacagttttaatttttgttttctctctcccatttcacaataaccctgttagttttatttatcaaaggtcctctgaaataaataatgcaattctttgccatgactgtctttggcacatgaaagatgtcactgtaaaatttctttcatgatgctacaggttgagctctttaagtgagcaacactaggctagttggaagcttatcaaggattcatcagtggagaaatatccttttgataatacatgtaataaaattacttgaagtgcttagacttaggtcttgtttattaaacatgagtggaggtttcgggcatccttgtaaactttcttctgtttcaggacttgctcataaattgctgagagacacgtgtgtcgcaataaaactttgccgtctttaagtctgaggtgctctgtgtcaggcataaagaacaatacacaacaattgtttgcagttatcttaatctaaagctgtagtttcattgaaaatgaacaggccatgacttttaccaaatacttccagccttcccttatctgatagaccatcttttggaaacaaccaggtggatgttaatgggagaagtaattcactaaaaacagttaattcaaaagcattgttttggcatccaaatccaaaagccttgttactgtttctaatgttgaatcacactacagatctttgagaaagttggtaacattgcagttcatttaaagaaaatgttgtgggtaaatctcctttctggtttatttagcttattctttataacaatttttttaattagagaacattcctgtgtgggtgattcatggtgccttcttttctccccgccttctrcctttttagatcatgaatcggttcagtggtgttatgacaacttcattaactacaggtccctgatgtccgcrgacaatgtacgccagcagctatctcgaattatggacagatttaatttgcctcgtcgaagtactgactttacaagcagggactattatattaatataagaaaagctttggttactgggtattttatgcaggtatgtagataatatgggaatgaataactaagtattcatatgacactgatttctattaacagtcctttgaatccactcaaaagcaaaagtgagtttgtgcatgctcataaaaatttatcttaaatgttggtacatccagtttctttgagtgaattaatatactaagaaattttaagtatttaatgagtaacaaattaatgtactaaatggctaaggtagtctagttatacaggaatcgtttttagaattattttattaatagagcctttgttatacaaaatggaaactttggctactttcagatgtgattaggcacctgtttcttcaggaatgtgaatattgatcagtgcattaaagtttctctgaatctagggcttaattggaaatacattgtcataacagagtactaaaaggaagcaattgagcggatccaaaagtacatacagttggctttagtctttatctaaaaactaagcacctccaaattcaaatattcaaatacgtggatttcatttacagtcctctacagagtgatcattggtaattatgaccaagacccttgcgtactgcaaaagccaaaaacgtctgttgagtagcaataaagatgaaacataatttaaaaggttttatttagtttaagtatgctgtgttaacggctataagaacagaagtaaaacttgtcaagtaaatactgtgaacagttattttaaggtgtttataaaataagagaaactttgagaaaaatgcaagaaaattttgtggtgataaaattgaaaacaaatcacctgatttgggataagtctcttctatctcttttctgtttgttcattctctctttggctgtgtcttttaagcacgatgtggcttacccttaaggccagatgggctcagtagctagaatatgagcctgaggacactcagtttcagaatcaaaaatcaaaggagattggtgagatgtctgtatttgaatctaagtaacacagtgtttattgtggcatcttattatataataggcttattagagtttggtgaatgataggtatgagcattctttcttgaaactcttaactatattcttaatatttgatatgttgtactggcttctctttgacatgttctgttcttttttagggggaggggatggggtgagggaggcaatgtctcactcccaggctggagtgcagtggtgcaatcacggctcactgcagcttttacctccctgggctctggtgatcctcccacctcagactcctgagttcctgggactacaggcacgcaccactatgcctagctaatttttgcctttttgtgtgtgtagagagagggcctcgccacgttgcccaggctgatcttgaacttctggcttcaaatgatcctcctacctcgacctcccaaagtgctgagattacagacgtgagccaccaggcctgggttgacatgttcttaaatttgctttttatatttcagaaaaaaactggccgggcgctgtggctcacgcctgtaatcccaagcactttgggaggccgaggcgggtggatcacgaggtcaagagatcgagaccatcctggctaacatggtgaaaccccgtctctactaaaaatacaaaaaattagccgggcgcggtggcgggtgcctgtagtcccagctactcgggaggctgaggcaggagaacggcgtaaacctgggaggcagagcttgcagtgagccgagatagcgccactgcactccagcctgggcgacagagcgagactccgtctcaaaaaaaaaaaaaaattgatgaaactatattcaagcattatacttcttaattatgtagattaaaatttgttacaaacagctaggcaccacagagtgtgcttgtagtcctagctactagagaagttgagtggagagcaaggagcgttgaagccagcccaggcaacataggaaaaccctatctctttttaaaaacaaacaaaaaatttattagaaacagcatgcattatagtacctgacacctaataggtgtttagtaaatatttcgaatgaaattgagtttcttttctattattcatgctcattctttaagcacagaatattagaattggaaagggagaactgtccattttgatgagtatcaccagtcaaggtgttaccaaaaaaagaaatgagagggaagcacgtgcaagctcttttttttttcccatttttattttcctgtctttgtaggttacctttttcttttcctctttgccctctttagttttctaccttattttttattctatttctttattttcttttttgaaatggagcctctcggtctgtcgcccaggctggagtgcagtgacttgatctcagctcactgcaacctccgcctcctgggttcaggcaattctcctgcctcagcctcctgagtagctgggatacagacacccgccaccacgcttgtctaatttttgtacttttagtagagatgaggtttcaccgtgttggccaggctggtctcgaactcctgacctcaggtgatctgcctgtctcagcctcccaaagtgctgggattactgcacctggctttagttttctaccttagacatgaatgttctggtaattgtctgctcatagttggcgcccagtgctgaagagcctgctctagatggtctcaggcaggaaagatcagatagtaaatgttgggctctgtggacccatgaagtccttgtcaaaactacctaacactgcctgctcttggagcataataggtatagacaaatgggcatgcctgtgttctaataaaactttccttatggatactgaagtttgaattttacatgctactcatgcttcacggaatgttttttgtatgatattttttctttctaattaaagataaataaaccattttggattcacagaccttacaaatagaggctatgagttggatttggcccacaggcagcagtttgcttatctctgcttttatcagacagtgataaataagtatagccatagaatgaaaagtaaaagggaggcctgcctcttcctaattatgtaggtagctttacaactagcaagtcagaagcattgtattaataatatactgggttttggtttcaggtggcacatttagaacgaacagggcattacttaactgtgaaagataaccaggtggttcagttgcatccctctactgttcttgaccacaaacctgaatgggtgctttataatgagtttgttctaacaacaaagaattacatccggacatgtacagatatcaagccagaatggtaagtacaccttttgttctaacagttttttgttagtactttgctcaaaatggaacctgactgttgctagagtcatggccttgcattcactcattgagaatttatatttcagtgtgtaggtatgagggaattgactggatggtgtgattaatctttcacacccttcctttgttaagtggacagtgggattgttgatatttatgggcaggatttgaagccaaatgtgaagttacatttgaatagcatgaaaagtttcttcaggggctgggcatggtggctcacacctgtaatcccaggactctgggaggccaggatgggaggatcacttgaagccaggggttcaagaccagcctgtgcaatatagccagaatccatctctactaaaagatatataggtgtgtacaaaaattagctgggcatggtggtgctgcacgtctatagtcccagctactggggaagctgggcaggaggattgcttgagcccaggagtttgaggttgcagtgagctatgatcatgccactgtactccagcctgggtgacagtgagaccctgtctctcagacatacttttaaaaaagggtttttttttaatttttttaatttttagagtttctttggagccattctcttgctgttgtgattctcaagtcagtactgtttcttgcttgcagaaatctgtttttttttgttttgttttgttttttaacattttttttgtcccattacaattagccctcaactatttattatttatatattggtttttaggaactgtgcaggcataaaaatgatagctctttgtgttttaacatactagcttctacaaaatgtagagtaagaacggattgttttattttaagcaaaataaccctcaccttcatggttttttgttttatttatgccagaatctattctataacctatgacaggaaatgtcagccaagagtagtgggactgaaggcacatattctaggtgctgtcaccgctttatattgtgcagctgctttcttatacggatttgggacttttgacacttaaattgtgtaggacattaccattttatcttaaacgctttgttgagaaaaaaattatatagctaaactttataaaagatttcagtcaagtgtattttgggggtatagagttacagttattaaaacattgaaaatgagaagatccaatcatttgaataccacgatgtttcctacacagaacctgttatatattactatatccttggagtggcaaattaatagtgtgccagagtaaagaaatcagtgactttatctgttatctttacattaatgtatcttgaggggtttgttattaagtttatggtaagtccaacatcagaaaattcacatcttactaaataaaatacttaacacatttctaaaagtgctatttgtaaggattagttatttgtatttttctgagacttgaattcatagatttgccttggttcatcagtatattaatgaataatgcctatcctattaacaactccagtacttcaattaaatgttaatttggaaatttttctgcccacttctaaacaggttggtgaaaattgcccctcaatattatgacatgagcaatttcccacagtgtgaagcaaagagacagttggaccgcatcattgccaaacttcaatycaaggaatattcacagtactgaattcagtgcttagaactgaagttattgagaggacagctttaaaagatgaatgaactcaaaagttcgagttgtgctcttcacgttggttcgataatggcctttatttgaaagctttttaatttttctytacagtaaatattccattctgatttcataaattaaacatttatgcctcccttttgtgttgacactgtagctcatactggaaaagtcgatcaatgttttgcagtttattgaaagtagttctatatataacaatgttataagcatttctttagaaatggttgawaatgcttctaaaatgtgattatcgaccatggtatgcatgatcgttgtaattgttgacattccttttagaagttgtgaaatgttacaacttgtgcttatgtagacacaatcttctgtctcagtacagaggcactgacttcaataaagtctatttatactaattttggccaaagccctttggtatctttgttctagtctctaagtatagttgtttttcaagtgtggagcttttttattattataattatactgttactacatatttagtatctttctaccaggagtactccttaggaaaagtagctgttaaagcagtatttttaagagcatggcttagcgctttgttaggttaatcaggatgtgatcgatctaaaaggggtaaaatgtgtgtagtgatcatttgaaactggaccccaaaagagagaataatgaaaggagagctctctacttgtctttcttagagttcctttcataaggctcataatttattaactacatttttgtcagatgtttttattatacttctagcttctcaaacacgtttattagtattaggtaagaggaaagcatattttagatctcagtttaacaaaattcttagtgatggaagttttatgcagtatacaaaataatttgtatagtgtgttaaaatgtacatttgaccttccattttctatgacaggcagtagacaagttgaaaacttgtctacattcattttggaatgaaaattgaggtgttttatgtggcccataaaatgttttttaatcagttattttcatatgaagactaaatactgtactcattagtctggacttccctcttcttcccctcctacctttataagtttttaagtgttaaaggaaatatataggtgtgtgcctggcatttaaatatacttggtaactagcatgtgacttagggagttgggcaagttaactctttgaagctaactagtatgctttttagtgtaggtaggtgttactaaatgatgcctagtggcttgaaaaagttaatgtgccttctataagtgcctcattttgttcccatggaataatttacatggtggaataatacttcaggttacatttaaatattggttagatattcatgcaacattaagcattggcaacattgccagaatgtcttaaagttatgttgaaaaagtctaagtacttggtcagactgttctcactgaaatggcagctctcaccagaggaatattttgcttgttaatttaagctgcaagtgtagtttgtaagttgttgtgtatctttataatctgaccatccaattttaagtaggtctcagagtggtgtaacgtattatttaatcttgggctgtgtaaaatgtgaagttagaccattaggttttcttacagagaaactgttacgtgttagagttttcagatatctagaataaagtttggtatttggcagagcttctaggaatcatgggtgtgcattgagaatggccacatagaaagagcaagttgagtttttatcatgatgtctatcccccaccatctccagttgttctagcctgcctacatctgaccaaagctgaaaattcttttttttttttttttcttttttaaagacggaatctcgctctgctgcccaggctggagtgcagtggtgcaaactcggctcactgcaagctctgcctcctgggctcacgccattctcctgcctcagcctcccgagttagctgggactacaggcacccaccaccacgcctggctaatttttttgtatttttagtagagacggggtttcaccatgttagcaaagatggtctcgatctcctgacctcgtgatccgcccgtctcggcctcccaaagtcctgggattacaggcgtgagccaccttgctcagcctaaagctgaagattcttaccattgatgttattgacaaagttgtggcttttaaaaatggtcttctctcaacctccttatcttacaaatttggcagctgaacagcaaagttgttagtttcctttgttcacatagagctatgactatcaaataatttatttgtgctatacaacaagaaaattaaaaagttttttggagattacctgaagaggtcaccttccttatctctcaacttggaataggtgaactgcttgttgcattatggtataaggaaagaaagccatcagtaagtagaaccattgaccctgcaaatgtcaggaaattaacacaacttgtgagaaatgggacaaaagatgccctacaataaaccaatttagctagaatccaaaagcattctatactcaagttttttatacggcatatgacttaattctagaattttaggtttataaggtactcgcatatacttagaagtaattttaatggctatcctccctaaccagatacatcaagcaaaacagttcattacccttgaaggctgcctaatagctcttagaaatgctaagctaaagccctttctgtgtaacacctgattccagtttttccttctagaacataattaaacaaggccattctgctacttgatggccatttagatatttggagttaactgtcatcttcccttatttttaatttagactgaataccctggttttgtttgtttgtttgttttctttcctgtcaacatttgtctttaacatggtttccagctattctgtacattcctggttaacatctgccaaatactctgtggattgcagtcagtactatggtctaagctggacagactgcagttgaacttgctatttcccaaaggaccaggcctaccatcacttctgttactacaatttcagattacattaacctttcaagcaaccacagcatacttttgtttcatattaatcttagtataaatttaaggcacgtaattattacttgagaatgttaatctctgtggctcagggctgagaagggaccttcacagaccttgggtcgtgttaatcttcggagacttcaccccacatgttcaaatatatccatagctcacatgttcaaatatgtccatagctcattaatgacatttaaaaaaattaaaggcaggataggaatatcttaattttaaatgttttctaacagtctcagaattcttctagtatgaaaccacattatttcaaacgcagtttttatcaatgttacatttaaaaatgaagttgacagattttagtaaatgattgcatgtaaacattaatttgaattttgcagtttctttaatattagagaacatgatgaggtggttttctggtcttgtgcatttttagtggtccctaaaaaatgggctataaggatttcttagatgattaacagcatttcagagcacgagtcatggttcagagacagtttttaaagttctgctttattgaggtataattaacatcaactatatagtttgataaagtttgacaaatgtatacagttgtgtaattgtcaccacaatcaatacgcaacgttttcatcaccctaaaaagttccccatgtctctctgtagctaatacccttcctcctattccaagtgtttggctacttggaatcatactgtgcgtagtgttttgtgtctagattctctcatttggcataatcctttcaagagtcatctatttcacatatatcagtgagttctttttttattgctgggtggtattccattgtatatgtaccatatttgtttatgcgttttccacttgttagaaaatcagcttttgactgttaagagtaaagctatttgcatgtagatttttatataggcatgggtaagtttttctattgggtaagtaactaggaatcaaggttgctgggttgtgataaatatatgttaaattttgtgagaaactgctagtttttcaaaatactgtatcattttgctcccccaccatcagcatataggtgttttgattgccctgtatccttgccaacatttcatagtatctattttactttaaattttagtcattttagtaggtgttgtacctcgtggtttgtttgtatttctctaatgactaatcagtaatggtgtggaatattgggatatcttttcatgtccctatttgccatttatatctcttaggtgaagtgactgctcataacttttgtcctttttataattagtttttttaattattgagtttaagagttctttgtgtatactggatctaacttctttatgagataatgtgttttgcaaatgtttctctaacccattagcttgtactgttgtttgcttaagagtgtctgttgcagagtagaactttttttttttgagacggagtttcgctcttgttgcccaggctggagtgcaatggtgtgatcccagctcaccgcaacctctacctcccatgttcaactgattctcctgagtcctcagcctccagagtagctgggattagaggcatgcgccaccacgcccagctaattttgtatttttagtagagacagggtttctccatgttggtcaggctggtcttgaactcctgacctcaggtgatccatccacctcggcctcccaaagtgctgggattacaggagggagccaccgcgcctgacccggaagagtagaactttttaaaatattgatcaagtccagtatttggttttgggttggtttttgtttgttttcttaaatggtttaatggtttgtgctttttggtcagggtcagttttggtggtatgctaagaggacagcaaagaacagtctggtttgagtggagcatgatctctttatttaggtaaaaacaggagactatgaatttaggttggggttgagttgtggaggaacttgaaggttaggctaggtgtgcatctgagttcaatatagaggatagattgtcggaagagggttcactgaagtcatttagaaaaaataccacacaataacccaggtaatgagattgaaccagaaaagaagaatcagaatgaaagggtcagagatgaagtggtggtgtaaagcagaagagtcatcagagatagcttgtgtaggctatatgagatgcatggcttggggtgccaatcgtgaatctaggctgcagatcagtttgagatcctagttgctgctgagagagaaaaaaatggtgaagattaaaaagcacagaacctttaataagagaaggggaggggcgaaggagcagccagaaagtaaaataatttatttagatagtggagtttcatgcttcagagaggtgtgtagtggaagggaattgtgaatcctgaaagctatgggaattggtaatttagtctttagccagcttatgtaagtttaaggtagaggatacaagcaggtagtcaaaagggcccagatgcagcctgccctgatgtgatcctcatgaagtgtttcaaagaaatagagcacctttctgtaaaaatagatccacgtaaagttttcaaaatattcctgagtctggcaagggtgggcctacctgaagtttctcctgacacactgttaattagctgctttgtaggtaggcatgtattcttcagtttgccagaaccccttgcatgccttcatttagtctacctgtaggcattgttgggtgagaaagggttttgaagtgggaaagcttgcaaagactgcttttaacggaaagtttcatgggcaggattgagaccaagaggaaagaaacttcaagttaatggactaccttgaaattttaggcaaaacctgtacctgtgtcatgggagagactgggattatggccacacttgatctgaagttgaggtcaaacttggtgatgttgccttgaaaatagagattttcatagaccaggacgaagatagaagggaaagttacaagggacttcagcttaaatttagtctctcttatcttggcacagagggatgtatctgttaatctgaggtggatcaagttcaggcttgagagagggagtaatgcatgagactttgaaagtagtttgattgtgagtaagcaagagatggtgaaagagatgccttagatcatgggcatacttagatcttacaattttgatgatgaattcacgctagcctgagaactgaagtggaaggctacccctggttgatgatgggtagcagggatgtagaaaagtgctaaagtctttaagatcttgccctttaaaagaatcatcaggtggggcagatgattaaagatcattacttagggtttaatgcgttcagtgtgtttagatttgcgtggcagttaatacccataaactca

SEQ ID NO: 95896 - DNA, 19562 bp, Homo sapiens
  misc_feature (1)...(19562): n = A,T,C or G
aagataatttattctagagtaaacagaaataatagatcaactggagaaaaaaaattaaatatagtcatccctcatttctcaattatctgcagaggattggttccaagactcttgcaggtaccaaaatcccagaatgcttaagttccttatatgatatggtatattatttatatataatctatgtacacactcttctatactttaaatcatctctagtttctttatacctaatacaatgtaaatgctgtgcaaatcgttgttacactttaaaatttgtattattttcaattgctatattgttatttttttccaaatatttttgatcagcaggtggcagaactgcacttgttgaacccagagggcccactgtaagtatgtttaatatcctcaaagatgaggaaacaaaaagacatgacaactaaatacactaagtaaaaaatcagctgggcgtgttggtgagcacctgtagttccaccacttggaggccgagatggacttgagcccaggaggtggaggcttcagtaagccaagatcataccactgcccctcagcctgggcaacagagactcaaatctcaaaaaaaaaaaaagtcttaatgtctacaaaacatgagaaaaagagagagagaattaaaatcagtatttcggtattcagctgaggctaaatatcaccatcatagaatgaaatgctgagatacaagaactaatatgaagttctgttagaaagttttaattattaatatttcattatgaaaaaactttagtttttagaaagcatgacagttacacgctaaaacaatttctcagtaccgtcaccaaattattaaatagacattcactttcttttttgtttgttttcaagacggagtctcactcttgtcacccaggctggagtgcaatggcattatctcggctcactgcaacctccatctcctgggttcaagccattctcctgcctcagcctctggagtagctgggattacaggcgccagccaccacgcccagctaatttttgtatttttagtagagacgggctttaccatgttggccaggctggtctcgaactcctgagctcagatgatccrcccgcctccacctcccaaagtgctgagattacaggcatgagccaccgcacctggccaacactcactttcaactaaagtaaataaaggagtgatttttttctttttatttttactttgaaataatttcaaacttagatatttaaagaataatacagagcactcccacgtatcatttattcagcttcaccaatttttcacatttggtcacattttatcattttctctctatatataattctatataatttataataaatgtgattaattatcaaattaacaataaaatataaattatacattatatataccacacatatatattatataaatgtatcacatacacattactattatttattttttctgaacaatttgagagtagattgcagacatccttccactttaccctttaacactttaggtcatattctctaagaacagggatattttattacatatccacggttaccaactttgggaaatttaatatttaccatttatcttttaacaaagataaaacaacgtttatccgatcaactttccatattccaatttttttttttagaaaaaaaaagataggttcttgctctgttacccaagctggagtgcagtggtgcaatcatagctcactgcagcctcaaactcctaggctcaaggaatcctcccacctcagcctcccaagtagctggtactacagccacgtgctgccatacctggctaattttttaaaaagtttttgtagcccagccaggtggctcacacctgtgatcccaaaactttaggaggcccaggcagaaggactgcttgaggctagaagttgaagaccaacctgggcagcatagcaagactccatctctacaaaaaataaaaataaaaataaatttctgtaaagatgaaatctcattatattgcccaggctggtctcaaaggcctgatctcaagcgatcctcctactttggcctcccaaagtgctgagattacaggcatgaaccacctcacctggccccaattttttaaatagtcccccaaaatgtctgttatatcacttttaatctaggatcacatattgcattgagttgtcatgtctctgtagtctcctttaatctggagcagttcctcattctttgtctttcatgaccgacatttttaaaaactactagccagtttctttttctttttctttttttttttttttttgagacagagtcttgctctgtcacccagactggagtgcagtggcgaaatattggctccctgcaacctttgcctcccaagttcaagtggttctcatgcctcagcctcccaagtagctgggactacaggtgtgagccaccatgtccagcttatgcctggctaatttttgtattaagtttcttttttttttttttcttgtgacagagtctcgctctgtcactcaggctgaagtgcagtggtgcgatcttggctcactgcaatgtccacctctgggttctagggttcaagcaattctcctgcctcagcctccagagtagctgggattacaggcactcatcactatgcccgtctaatttttgtatttttggtagagacagggtttcaccatgttggccggactggtctcgaactcctgacctcaagtgatccacccacctcggcctccaaaatgctgggattacaggcatgagccaccgtgcccagcctgtttcttttatacagagaaaatattccttacttggggtctgtctgtttctttgtatttaaaatcaagttatgtattcccagccacatcactacataaatgatgtcatgctttctccggggaacatttctggaggcacatgatattcttctgtccctcattggtgatgttaattttggccagcaagtcaaggtgctgtctgcttttcccactgcgcggttacaatttttcctcttgcaacgaataagccaactatggggagatactttaagctacgtacataagctgcttctgtcaaactttccccctagaattagcattcattgataattcttgcccaaaccaacttttactctgatggttgcaaaatagttattttcatggggggaggggggaggaatagctttaggagatatacctaatgctaaatgacgagttaatgggtgcagcacaccagcatggcacatgtattcatatgtaactaacctgcacattgtgcccatgtaccctaaaacttaaagtataataataataaaataaaattttaaaaaatagttattttccaactccatcagctccctccacatttattaattggcattctcccttctccttcattcattcatttaattaattaattaattatctatgtattatcagtgtggagtcatggattcctatgttttcaatggttcataattcattcctggtcatctccgctgggggcaccaaccagataaagtatacctgtcttatatgttacaaatattttttcacagtttgtcatttctctctcaaatttagtgtatgttaatttcttcactcaagtttttcatatagtcagatttattaatatttccctttacatctggcttagagatctcttccctactccaagatcataaacaaaacaaaaattccatgatttcttcttttgagacagagtctcgctctgtcacccaggctacagtgccatggcaccatctcagctcactgcagcttcaacttcccgagctcaagcaatcttcccacttcagcctcctaagtagttggactacaggtgtgagccatcttgctgggctaatttttaaattttttgtagagacgggggggggggggggtctcaccatgttgcccaggctggtctcgaactcctggtctcctatcgcagcctcccaaagtgctgagattacaagcatgagccactgcgccnnnnnnnnnnnnnnnnnnnnnnnnnnnnnnnnnnnnnnnnnnnnnnnnnnnnnnnnnnnnnnnnnnnnnnnnnnnnnnnnnnnnnnnnnnnnnnnnnnnnnnnnnnnnnnnnnnnnnnnnnnnnnnnnnnnnnnnnnnnnnnnnnnnnnnnnnnnnnnnnnnnnnnnnnnnnnnnnnnnnnnnnnnnnnnnnnnnnnnnnnnnnnnnnnnnnnnnnnnnnnnnnnnnnnnnnnnnnnnnnnnnnnnnnnnnnnnnnnnnnnnnnnnnnnnnnnnnnnnnnnnnnnnnnnnnnnnnnnnnnnnnttttttaaaagtttttgtagcccagccaggtggctcacacctgtgatcccaaaactttaggaggcccaggcagaaaggactgcttgaggctagaagttgaagaccaacctgggcagcatagcaagactccatctctacaaaaaataaaaataaaaataaatttctgtaaagatgaaatctcattatattgcccaggctggtctcaaaggcctgatctcaagcgatcctcctactttggcctcccaaagtgctgagattacaggcatgaaccacctcacctggccccaattttttaaatagtcccccaaaatgtctgttatatcacttttaatctaggatcacatattgcattgagttgtcatgtctctgtagtctcctttaatctggagcagttcctcattctttgtctttcatgaccgacatttttaaaaactactagccagtttctttttctttctttttttttttttttttgagacagagtcttgctctgtcacccagactggagtgcagtggcgaaatattggctccctgcaacctttgcctcccaagttcaagtggttctcatgcctcagcctcccaagtagctgggactacaggtgtgagccaccatgtccagcttatgcctggctaatttttgtattaagtttcttttttttttttttcttgagacagagtctcgctctgtcacccaggctacagtgccatggcaccatctcagctcactgcagcttcaacttcccgagctcaagcaatcttcccacttcagcctcctaagtagttggactacaggtgtgagccaccttgctgggctaatttttaaattttttgtagagacgggggggggggggtctcaccatgttgcccaggctggtctcgaactcctggtctcctatcgcagcctcccaaagtgctgagattacaagcatgagccactgcgccgggtttcatgatttctttcactacttttatgatttcacctttaatattaaaatatttaatacatttggaattttggtgtaagaagtgtagagattccactttcaccccagctgattagtcatttgtttgtataaaattcattcattcaataatccaccacacacacacacacacacatattttcgttatgttctatatttcttgttatatctttttttcctattgaatcttgatgcatcttttattagaaccacggagccacagaactccgattctcggcaatgtgaggtatcaggctatgacctaaggcttgcaagcagaactaccgccaatctggcctctctggggttcccttcctcctgcaaggttgcaccaagcggcagttcggggaaatagggccttcaattacccagtgtgtatctcttgagtgtctgttaaataatggggggcagggcggggaggaggggtagagggaggctgtgcctcagtctttgttagccaggcagagcgtttattttccaggggttgtttcctttatcttcatcctaacattcaaacttgacttgagttttagcgcgcccccgccctacctcctcccaaagcccttatttgcccatccttgcctacaagctcagaacgagcaggcaatggaatggatgtcgtgggagcaggcggttgagatgccagtgtttgaaggctaaggactgggggctgtgagcgaggaccttcccgcgtttgctccgcgcccccgcagtttcctccgcgcccactagaaggcgccggggcgctcgcattccccgcgcggagccgaagcagccgcaacgagccgggagctgagccgcgctgcgctgcggtgcgaagagccgggcggcggccagagccctccccgcgctgccagtgggacgcggagccagggatccccggctttgccccggggctggggtgcaacagactcttaacttggtcctcgcgccccgccaaccgccccmgggcaggaaacgcccagaaccaccaccgcgccgcgctccacaaaagccccgggagttccaagacgggagggatcgggcgcgctccagaggcaggagggtcccccacaccctcaggctcatgcccagctcccccatcgggcagcccccagccccatgaggaccctcaggccggggcgagagcccggcacagcccggaccgaaattttgccgctgccttagagcgttagacaggtcagtgcccgggggtgggtgggggtgggattggttggtgaggggaggaggaggaggcgggaggaggcgggaggaggcgcgcttcccggtccactctgtcccccgcgccgcttgccgaggccactcatcgggtcacctccgccgggggcgcccgccagcacgggcatgattctgcattttttcctgacaggctaggtgtggagccgccctccgcagcccaccccggcccaggtgatgctcagactgaggagtcgggggcgcgccggccagggcgggcggcgggcttggggactgccactgccctgatagagcggggcttttccgcttacgcacggccgcgtcgaaaccgcggcatccaaatgtcttcagcattaagatgccaggcctcgggtgtgwgaggaaaccgagatgcaggagagggcgagaagaaaggaggccgggagaccctggggcctgggaagtgaggggaggggtaccgggaaaaccgcggctggcagtgcaaaccctagcgcgatgtgtggagtggagagcgcycttgggagccggcaggagcytctgaggacgcgggggccaarggccccatcccttgccctcccttcttccctccctttctcactccccaccctacccccacctaggatgtggctgggccgccgggccctgtgcgctctggtccttctgctcgcctgcgcctcgctggggctcctgtacgcgagcacccgggacgcgcccggcctccggstacctcttgcgccgtgggcgcccccgcaaagcccccgcaggcccgagctgccagatcttgctcctgagccccgctacgcacacatcccggtcaggatcaaggagcaagtagtggggtgagtgccgaccgcggcggcgcagcgcagcgctcgctgggggtggtctgggggcttttgttttctccactgctgggctcagatgcctgcattctcctaacgggctgtgtggagtgaagtgggaggtggaagtgggaggctgctgaggcttgggctggggaaaatctgttctccctgaaccttgccatggggataaggatggggatgggcgtgggaggttgtgcagtcaagggagggccctgaaagactccctgaggtcctgattcaggtatgagaagagactccaggtggggtcctggttggtgggtaggcagctcctgaaatcctggtaattggccctatcctacaactctaaaatccagatttaggggataggtcatccgatccttggtccccctcccgaggactatttgaagggcagcatttaaggggacagagcctagacagacagaattgcagggccaaggtgtggggtgctgtgtcagtgtttatgggatgaatggagctgtgtagctgggctctgatgaccctcactacctacccccttcaggctgctggcttggaacaactgcagttgtgagtccagtggggggggcctccccctccccttccagaaacaagtccgagctattgacctcaccaaggcctttgaccctgcagagctgagggctgcctctgccacaagagagcaggagttccaggcctttctgtcgaggtaccagcttgaaagaagygcatgactcctcagggggagagcagtgattgtgccgggagggagagaccctctccccccgactctgctctgtcctctccttcctccactgccaggagccagtccccagctgaccagctgctcatagcccctgccaactccccgctccagtaccccctacagggtgtggaagttcagcccctcaggagcatcttggtgccaggtagggaggagggtcccagaggatgacctcagccacagtgggggtggcagagcccaaggttgggtggggaagaatgggagatgattggaatgggaggtgggaacctctgatgaatgggggacttaagctcaaacggsggcttaggaggtgggaagtgaggacagaagggactctaggaatttcagaagactgtaactggggagttttgggggaaataatctattctttgctgactaaccattggttaggtggtggtcagggcaggccatagggcaagctttgacgggacgggctcaaaaatcagtcactgtaggctatgttatacagtgtgccctgctgaggcctcaataagaagaataggtggaaagttctctattgtgtgtggtgacagcagggagagaaaatgagaaagaattcagggctgcctatgtgattctgatccccccactcctttctcctagggctgagccttcaggcagcttctsgtcaggaggtataccaggtgagagaaaacaagaaggcaaggaggccaagtaggcatcaagaatgctgggagggaggcagggctactaagggaaggatgggcgaatcagggaggcaagaagtgggtctggggcctaaccctgcactctccaatcccctcctaggtgaacctgactgcctccctaggcacctgggacgtggcaggggaagtgactggagttactctcactggagagggtcaggcagatctcacccttgtcagcccagggctggaccaactcaacaggcaactacaactkgtcacttacagcagccgaagctaccagaccaacacagcagacacaggtgcaaggcctgggtggagagacgggcaggctgggcaaacagagaagaaccagaaaggctggagtgggcaaatggcagagggcatgggaggcatctgggctatggccagagctgtccagccacacaatgggtgcttcaactggaccagcagggccagagggagaaagggggcctttgttcatctggggctggarcaggccagagggaaacccgagccttgggtgtgtctcccctttaggccaactgtggggggccccaggaagagacttgtctaaggagttagaagactatattcccaacccaccccttactagagggcaaaggtctttactttcctgagakcccatttctcttccagcaaaagaggcctaaaagccctctttgcttctccccaaagctggtttgttgcactaagtttgcttccaccttagggcctttgcactttctattttctcagcctggaatgctcttccccagatttttgcagactggcttcttcttgtcatttagatctcagttcaaatgcctcctcttcactatcacattacttgtttgtcttattttccactcaatacttaccagtatctgaattttttaatttacttagcctggcaccagactgactaggttgctatcagttttgttgcttaatagttgtgtaaatgtggcaagttacttttctgtgtctcagcttttttttctgttgtaggaatctacttaatagggctatcatggggataaaatgagtgcatatatttaaggtaattttttaacgggtctggcacatagtaagtgctcaataaagattagcttttacttaaaattttctttgttgttttttctcctacccattagaatgtaagttccataaaggtaagaaccttctgttcttgtccaccaaggcctagaaaggtgggacacagagtaggcacttaaatattgattggctgaaaacagaatgttatcccacccttcagggtcaaatgccatgtcctttcttcccagtccggttctccaccgagggacatgaggctgctttcactatccgcataagacacccgcccaaccctcggctgtacccacctgggtctctaccccagggaggtgaggctggtaggggcagggacatattagaaccagccttggtggggagcaagttgggagagggcagtcctgggaggggatatctacctgttcccctctcccaaccctccttgtctgcacccaaccctgtgcccccawtctcagcccagtacaacatcagcgctctagtcacgattgccaccaagaccttcctccgttatgatcggctacgggctctcatcaccagtatccgccgcttctacccaacggttaccgtggtcatcgctgacgacagcgacaagccagagcgcgttagtggcccctacgtggaacactatctcatgcccttcggcaaggtgtgcagctagcaggctgaacggcaggccagaggactcccgcagggggtgtgccctcaatctgcagcctccagggtagtgattcgaggaccacctgcctcagaatcatggggtgcctgttaagcatgaggattcctggaatgtaagcttcgtgggagcaggaaattctctctgaattcttagaatggtgcttagtgcctaatggcattcaataaaatagctgatgaatgaataaataaatgcacacggaaattaaacgcattctaagaccactgacttggaacctctgtggggatctgcatttcttttacctagctcctggcctttcgaaagcactcaaaagtctggagaagaatacaagctgagaagggtcgggggagagaaagaaaggtggcagagggccatgtcctatttctgcagcytccccaaccacacacacctttctgccagggctggttcgcaggccggaacytggccgtgtctcaagtaaccaccaagtacgtgctgtgggtggacgacgacttcgtcttcacggcgcggacgcggctggagaggcttgtggacgtgctggagcggacgccgctggacctggtagggcaggggctgcaggatgtgggggtggagaagggccttgaacaggctaaggccacagcgggggcgctrcggccaggaacggccagccctaggacaaagagagaaccacgaagtggggcctgggaactgtctgggtcctgcaggggtgaagcggaagaggatggggcaggggtacccccgaaggcaccggagcgcagaccttgaccccttcgggtcccctatcccaggcccgcctggaggcaacctccctctccctgcaggtggggggcgcggtgcgcgagatctccggctttgccaccacttatcggcagctgctgagcgtggagcccggcgccccaggcctcgggaactgcctccggcaaaggcgcggcttccaccacgagctcgtcggcttcccaggctgcgtggtcaccgacggcgtggttaacttcttcctggcgcggactgacaaggtgcgcgaggtcggtttcgacccccgcctcagccgcgtggctcatctgggtgagtggcaccccctcccggtcgaccctggcaggagccccacggggagctggcgcacggtcacgcgcctctcctcctaggctgcacccgcgcccagccgccagcgggaaccccagaacagttctgcagtgatttaccaagacctgcacctgggcgagagacagctcccaccctctcccagccccgcatactctttttttttttttataaatatatatattttttgttatactttaagttctagggtacatgtgcacaacgtgcaggtttgttacatgtgtatacatgtgccatgttgaatctccattcccagcacagccgctgggcccccataagcttccccatcactgttcccgccacccctgctctactcccagggcttcccctagttcagaccacagtcggtgcaacccatctggcgtttatttaacctctgggagtaggggtaggtttttcgattttcaaagyacaagtatattgactccatttacacaagagtaagactgagacccagggagttgatttacatgctcagggtccttagaaacaagcctttgcacacacactttccacacyctaaatttgagagttctcccttaccagtcggccttctgcaccctcaggatccctcactgtgtactcccctccacccccagaattcttcttggatgggcttggttcccttcgggttggctcctgctccgacgtcgtggtggatcatgcatccaaactgaagctgccttggacatcaagggatgccggagcagagacttacgcccggtaccgttacccaggatcactggacgagagccagatggycaaacaccggctgctcttcttcaaacaccggctgcagtgcatgacctcccagtgatrgcccgctggggatttctgactgtcaggctgggcctgcctccttgtccctgccaggaatttccaacaaaccccaccaccctgtgagcactctactggctgtccctgagcctctagttcctcactcttccttttcagaacctgatgcccagtaggggttgtcctggygacacccctcctttttccagtgcccagaggcctggtggagccataacctctcccacagccagtgccaagtcctccccctgcccattctcatggggcaggaaatggggggatcactttccaagtgccaaagagcccagagggactctaagaacctaaggtggaaacactgtcctctcatcttgggaccgagggggtggggaagttccccaacacataatcccaaractgtgcccctcatctgcatcttcagatccagtactctgtgtacctgctccagccccacccccacagagagaacttgtggctctggggctggggtgagggctggtggttggtgaaagccattcttagttgtgtctctgcaatgctgtgggcacaaaagaaggggcaccagagtccctgtgcaaacacctagactcacttcatgkattccaaagctctcagcttcattttattagttacgttaggtaagggggttcaagggtcatggtcctcatcacacacatgtcatcagggccctctgcactccacatgatgaggtcagacccacacggtgcaaatctttgggtcagtgagctcctggagaagagaggagacatgtcaggaatagattaggcacccctcttccttaatgaaatgtggcagtcctctcaggggtaccccacctacttagggatctgagttcttcagttcctcacccatagctcagcccgggctccctgatttggtcttcaatctactattcattccgtccccacccttttcttcttgatcttcctcagaccctttcccaaacccctctccctgggtctccagccacttacccctgcctcacttgccgcagcccagtgcctcctggctcccrctcctggtgctactgccccttamcaggctccccagggcataagcagctgcatcctgcacactcacaaacagctgatctggagtcaccctgtccaggagtcctacccgggtcagtgtcccctgcaccaaggctatgtggggagggtgtcagactctgagaccctaagtccacaccgggtccttttccctaccgcaggtgtccagtcattgcccaggcactgggccccgctcttctccacacatctcaccattacactgagccaggaggaggcggatcctagcatctcgacatcggctgrcsagctgcagggatggggcaaaggggttaagtcccagatcagagggtatgagtgagatgctaaggggtttctcctcaacctaccctctccctcacctgcaccacttctctggccccagcagcatctgcaaaggtgacaccactgaagtctaggaccaccaccctgacaggctcagcaactagaatgggagaagacaggagtacccaggtgtcaccatrcaacatgcccaaatcttccttcttgtcaccccatctcacctgcaaccattgggccatctggctttgaagtctcctataagtaaagaagggcagtcaccactcccgaaacacagcatgaacatgcaccccttgagcacaaggatccccctcagaacacccacctgcctcccactccctgaggatccacatccctcctaaaccaagctccttcaccttttctccttctccgagccccaggtgccactccaggttgcagcgaaactgcccacgggtcccaaagtacagtggtgttggatagctcaggatgcagagccccgggacctggaggagctaagaggtcaaaggatcagagaaatgtctggggctaatcttcccttccttctttggctgcagcccacccaccctggggcttcctctgagtggtctgtagagctctgtcccctcagcctgtccaagtgccaggcactacaccctagggaagaaggtggggccagatttccagcttagcctggcctggctggagagtcaccccaagcacctcattctcttcccctgccccgacctcaactccactcatctctatgcccacctccgggtgcggcagaccacagtcatcatggagaagaccacacccacagccaggcccaaatccacactcagggtcactactgccacccaggtgaccatccacacagcctgcaggatagggataggggtggattgcccaaaagaaaagccaggccatcactgctgggtaaagagatccagggcagtgactaccaaggcaagtgatggggagagatgatccaggaagaagtggaaagcatgacagaaggaaacaacagggttgattcaatgggacacacaccaaatgtaatgacccgcaccagttgggaagttacaaatattcaggccaaaggggttcaaaccccatcctttcccttgcctgtgagtaaagcatactaggagttatgtttgctgggggagtgggtgggttgcagaacttaagaccaggacaattaggtttggttcagggcagaggctggggatgctaacaagatgagagggggcaatctgggggtaatggcatttctcacaaagtccactcggctgatgtgccatagttgtggaagttcctgcatctggcagaacacctggcgcatgctggagatgttgatgcaagccaggacagccttgaggcagaggaggtgggctgactacctcgatgtcctggaatacagctacccctcccagccatgctcatgcctcctctgctcattaccttgggcagatagtaaaagaagggccccagccacagcagcaccgacaggaccactgtgcaggagaagaggcctgccagctagagaaaaggaggaacaggagcaaaaaaggaagagagcctcccacccccacatgagagctggtcttcctgcccactctgcctaatcttcctcggaagtctcccttctcccaaatctccttccacacaacccccttcttaatattctgccattcacatctaaccctcccgctccccccaattaattaaatgcccattattcaccagtctccttgtagatgtccattgttcaagttccccagttttgtagcccacctccaccttaaaagccactgttgggttaccctataagcagggtatatgtgtttagggcaccagcaaagtaagggaaaccaaaaatattagggggagactttgatatgtgatattccttttaaaagacaatgtcattgtgtgaaaaaaataagaattttatctcttaagtttattttatagttttgtgtttttattttgaaccacacctggggcaccataaactttttcagcgcttagagcctacaaaggtcttactggaacattgttatcttccatctctcctatctataattccatcccctcagtcaccctttctcacagatccccagtcttctctatataggtgccacctgggattctagccatcttccacctgtttctccaccaccgccaccttgcctggatggcccatcctttctcctcatccaaggatgccctcttacctgtgttttcccaccagcatccaccagtagattggtggtggccagcgtagccgagttgggaaagcaagagaagagggaggagatgaggttggaggcaccatgtgccaggaactcctggagggatacagtgagatgaagtgggagagacaaaggcatggtgggaagtcaaatgagagggttggggtccacagtcagagtcccacctggttggagtcaatagtgtagctatacttgtctgcatggatggaggccagggaggcagacaccgcaaaactaaccagtgcaatgggcagcgagtcagccagaatcctgggcagctcagccaggttggggaggaggggttggggaaatctggagagggagggatccatggtgaggaggggttaggtgcttcagtgagataaggaaggcagagaaaatggggggtggagataagagggagtgttgggtgggagaggtgggagaagagaaagctggcatcttttcattctcttaccctccaggcaacagccccactatctggacttggtatcttgtgtccacagaagaggtgaagcagagcacggaggccagaagcacctgaaaaagagagcaaaatgaaggcatgggaagagatggggtccctggcagaagctagaaggggctgaccatgagagaggaccataatgcaggcctagctggctgcaggagcccagcacctgggggagcggggatgtgtttgggatgagggcctgacaactgatttgtagtgtagagctgggaaagagggatgacatatgcctgaggccacagagcctggagccgtggaagtaagaggacgcttctgtgaaggatggtggatatgaagagatgccactgagccttccaaagagggaagctggacgatatctagtgatatactggcatctgtggagacgcggaacgtttatttagttggggagagagagaaatgtcggtggagggtggagagggagatgcactgtgaattacagggaaggaccctggtgaggacagatgtcagagaaggtgctgtgaccagcaagacctcaagggagcgctgtaggatggcagaggaaactccaagaggtctagggggtgctccgtgagagacgtgggacagtgtcgaggggggctgtggaaggtcaaagcgtccttctgcaggaggccaaggaaagtgtgagccggccctctgttccgtggcctctctgcactccaccagggggcggcagcggccagttcccacaggaccgcagggtctgcgcgggcagggggccggcgcgcacggccatcctcaccaagacgacttcccccgggatcggcgtgggtagccggtctcggaatctcacgttcaattccttgaccggcacgagcagcgccaggctgagcgcggagatggtcagttcggccggactgctccgaggcagcgyagtcagcaaggaggccagcgtctgagggcaggggcgatgagcagagggccccgtgccagggctcatgcgccccggcgcgggacccccagagcgaggccctctctacccagtgccaccagggcttacacctcctcagcgccctcgttcagccacgtggctccaacctcctttcctgctcccttgtcacatactacccctccaccctccgtccttcctcccttttcgagtttccctattcacgggacctctagaagccccttctcctttcttcttccacccccaccttgaagagagagaagcagccgatctggcgcgggagggacaaccccaagaggctcggcagctgggacaagagcacgtgcagcgcggccccgctggtcagcgccttgaccacaggctcggacaaaaaggtggacaagacgccgagctgcagcacgaacatccccagctgtgggggagaagacgcgctgtcaccatctagaggaggagcaaaccaaccccgcgcacctccgccctcccgaacccaagccgaaagctggtccctccctcttccccggcccaatttccctggcccctcagcagggatccccccgggttcctccccgggtcctccctcaccrtcaacgccccgctcccgaaggccacggccgcggctaccccaacccgttgagcgtccagctgctccttctcgattccgctcagattccccacgaggggttccggcaccagccgctcgacggccgagcctgtcatgaggctgagtatggcgaaagttcctgccgccgggggacaaatgcagacatcaccagctgtgcagccctgggcagggcagcagctcagggtccatgccttgggtccgagatcctgctgccagactcggctctccaagaaggctgctgccccgtcaagactgtggggcgcgaagagctgcgctagccggcaaaaactgctccctcctgcagattctctgcctactgcgtgcccctttgggggaccatgcacctattcttccccttccaagtccctgagatgttcattttaaccaaatttcataggggaaaaaagttcaggtaaactcccacctctttgcacccactctagcaagcattgcctaggtcagtttcctggcagggttgggcaaggagggaggtgaaggtaggagaggtgaagagggaaattaggaagaagggaaataacagcccctgtccattttcatcccatagggaagaagagtcattggaagtccctggtcactcacctgtggacaggtgtctcccagtacctagcaagctgtagatgaggacggggaagaaagaagtgtagagtccaaacaccgggggcacggaggccaggagagcaaaagccatgcctgggatagaagtggatggaaaggtgtgctgtggggagggggccttgtccaacctccaggacttaaatgcacttcccagactcttaggagctgacatcaaggatgctaaatcaagcctcatcagggaactgaggggttaatgggcctcagtgagaggtcatggagcagacaaggtcagggacgctgtggccaagtcctgggggccaggcgttgtgcctctctccggttctctgagccagaacctgtctaaggcttctcgcaggattgcgcagatgaggggaggtggggatggggatctgatggagctccacagtccttacctcaaacttggcctcagatccctctctcccaccctcgacggtaggaacccaccatctgctcccggattcccagctccctaagcctcctcccggaagccctctagagcttgtgctcccgacaggctgctgttagggcctctcaccctggggcacgtgcacgatgcccacggtcactccggccaccgcatctccgagcagccaggcccgccagcggtaatggggcagccagtgcagcgcgggcagccgagccagcagcaggcgccacgcccctgtcccggaacaagcgcgagcccgcagcctccacagcccgaagagccggggaaagccgcgctcttcaggtagctccggttcctgctcttcgcccctgaagagc

SEQ ID NO: 95897 - DNA, 24262 bp, Homo sapiens
ggatttctttcttgttccatactgggcggcatgctcctcccatctccaccccttggtttgggggcttccagctcattggcaaaatctctctagttgccttcctttcaagctggagcctgacttttccccaatgtacattttttttttctccacaaagagttccttctctaatgtccccatctggtattaagtgcactttaaagaaaggggcagggtggattttcaagaggtgggaagctctaaggcttgaccctgaggggtcttctcccagccattctcagcccatatgcagcaccctccatactgaagaggactgttgttttagtttcagacggtcctttccttccacatggtgctaaggtggttttctaggtaactgcagggatggaggtcactagccattccaaaccaggagagaaagtctggtgtcctgatatccagtcttttctaggaggaagaccaagattctccagcggcagggcagcctatcacccaacttctaagtcaggaaaggaagctgagtgggaatgccagctggtaagcgcaggctgcactggcccatgactccttcaaggaaaagaggccctgctccctttacctgctgagctccttttagcagttagggagaactgcagggggaaaaataccagtggagtgtggaataaatccaaagcagtgatttttaaatgtttttcaaaaacaaatcttacatagaaccccaatataaaaaataaagtaatgcagacctgggcagtttgcatttttttttttttttttttttggtggaagaagtctcagcgtctcttaggactgactgttcaaaggctcctcagcaaatgagcccttgaacagtcctaagagaccctgaggattctgtggagtagtttgaaaaccattgttctgaggaagggggtccaatctggctcctctgcactaaagctgcaactcatggaaaagagggcaacggtggggtagacaagccatgctgtctccagacccactagggtggaargaaggttcctgtgggcctgtggacttaggctaatatttgctgtcagcagggcacttaagaatccagggggttttatgtaatgttgccaccacatggttcttttaaaaacacataaggaaatgtgagggtgtagcgcagatgaggagagagatgacacagagggagcagccttctctttagcaagatgtaagggaaatataattcacttacataaaaaagaaacaacacacacgcaaacccttcaccagaagcttcacactacatcctcctcctcctcctgctccccaccttcaccgcatccctttcagagccagggtcactgcaaggggcacctggcctgcccactcacatctgccaaaatgttgcatgccagcgtggaagacaaaccaaactgcgcaaccccctgtgtgtatttacttggtgtacatagataactttaaaataaaataaattcaatgataactctatgttgttgtaaatattctttatcccttcccaatctcactgccttctttggatgaaatggaacttgatagaatatatccttccagatgtttttctatagatttacataaggcttgatttttttcctacttgacaatatatcctggagatctttgtatgtcaatatatatcaattgacctcattaaaatataatttttcacatatttatcctacagttcattcaaccagtctacgactggtggatatctatactgtttgtaatttttaccaaaagcactatcttgttctttcatttttgacccagagcagtctcagtcctggcatcaattccttcccactccagtgtttcaccatctctccacagccaacagatcaatattcctgtcccaggatcatccactacaatcacccttccaacccccattttaaagcatactccacctctcttctctgctcatatctcaaagcttctcagatggagaaaactgcacacccaaaaaactggggcaagtaaaactgaagagcctacaaacctgcccggactttcggtgcttctcactttcctctcctatctcccagagcaagggtctacaccctttccaccctcctctgtcaggcaacaactttgtcatctaaggcacttgagcctgaaattcttttatcttgccccctgcccacatgcacctacacaattacctatctgtgtctgcacttatcctttccttctcccttctgaccagtgataaatctcctttctctgggctaaagtgaatcccttctagatatttcattcttgagatactgatatagaatctcaatatacaaatatataacatatctaaaactgataaactgatggagacttgaggagtttgcatcttttttttttttttaaaacagagtctcgctctgttgcccaggctggagtgcagtggcacaatctcggctcacagcaacctccgcctctcaggttcaagcaattctcctgcttcagcctcctgagtatctgggactacatgtgcacaccaccatgcccggctaatttttgcatttttaatggagatgggttttcaccatgttggccaggcttgtctcaaactcctggcctcaagtgatccgcccgcctcggtgcatcttctttattaatgcctgtctcagtggtctcatctccttgtaaggtccttcccataagagtccctccctttactgtgtgtttctctaactgtgtgtttctctatcttacttgttttcttaaagtcagatatccagaaaccatcccaagcttcccatccccacttcctcaccccctattcattccttagcccaccttgatctgcctcttgttctgctcaaaactgcttttccaaatggcattagttaccaaatacagtggacatttcttctggacaacagtccttgttttgcttcacctctccatgacatatacttcttcactccttccttcttgaaactcaactccccttggcttttgtgaccctgctgtcttggctccctgtacttccctggccacccttccgagtcttcctccccaggcctcttaaatgctgctctatcccagggctcagcccttggttccttccttgctctttctaagacatgtcatccatgcctgcagattccacaattcttcaatccgtatccccagtccagaacattctgctcagctgcgggagcatgtgtccagctgacctcagatgcctcaaacatgttccaaaccgaactcaccttcctctgaatctgctccttttcatgtcaccatcatctctctgatatcatcatcatcattagccagaagccttagactcactctcaatgcctcccttttccttcaatccccacattcatatgaattttccaagttgacatcaaactgcatctttagatgccaccctcttctttcaaacacaacagccactgctttagttcattatctctccctgaacttttgcaatactcaagtcatcctccaggaacatgcctgagtgatcctttttttttttttttgagatggagtcttgctctgttgcccacgctggagtgcagtggcaggatctcggctcactgcaaccttggcaccccccctcccccagttcaagcgattctcctgcctcagcctcctgagtagctgggattacaggtgtgcgccaccacgcccggctaaattttgtatttttagttgagatggggtttcaccatgttggtcaagctggtctcgaactccttgtagggtccagacctactgggcttagcgggtgttctccctgtgtgcggagacgagagattgtaagaaataaagacacaagacaaagagataaagagaaaacagctaggcctggggaccactgccaccaagacgcggagaccgatagtggcccctaatggctaggcgcactggtatttattgaatacaagacaaggggcagggtaaggaggggtgagttgtccaagtgattgataaggtcaagcaaatcacgtgatcatgggataggggtcccttcccttttaggtagccaaagcagagagggaaggcagcatacgtcagcattttcttctatgcacttataagaaagatcaaagactaagattttcactatttcttctaccgctatctactaagaacttcaaagaggaaccaggagtacaggaggaacatgaaagtggacaaggagcgtgaccactgaagcacagcaccaaagggaggggtttaggcctctggatgactgcaggcaggcctagataatatccagcctcccacaagaagctggtggagcagagtgttccctgactcctccacggaaagggagactccctttcgcggtccgctaagcaacaggtgccttcccaggcactggtgttaccgcttgaccagggagccctcaaatggcccttatgcgggcgtgacagagggctcacttcttgccttctaggtcacttctcacaatgtcccttcagcacctgaccctatacctgccggttattcctaggttatattagtaatgccacaaagagtaatattaaaagctaatgatttataatgtttatactgatgattgataattgtccatgatcatctctatatctaatttgtattgtaactactctttattctaactattttctttattatactgcaacagtttgtgccttcagtctcttgccttggcacctgggtaatcctttgcccacaactcctgacctcaggtgatcctcccgactcggccccgcaaagtgctgggattataggcgtgagctaccgcatctggctttttttttttttttttttttttgagacagagtcttgctctgtcgcccaggctggagtgcaatggcatgatctgggctcactgcaacctctgcctcctgggttcaagcgattctcctgcctcagcctctcaagtagctgggactacaggcacctgccaacatgcccggctttttttttttttttttttttttgagatggagtctcactctgtcacccaggctggagtgcagtggcgtgatctctgcttggcgtgatctctgcttggcgtgatctcggctcactgctacctccgcctcctgggttcaagtgattctcctgcctcagcctcctgagtagctgggattacaggctcacgccaccacgcccggctaatgcccggctaatttttgtatttttgtagagacgaggtttcaccatgttggccaggctggtcttgaactcccaacctcaggtgatcctcccgcctcggcctcccaaagtgctgggattacaggcgtgagtcaccgcgcccggcttcgttctttcttgtctccatgtctttgtatgctgttctctttgtctagacagccttttaacctctattcctgaactccacccacccttccaaactcagtaaagtctctatcctctttgaagccttccctgaccagctacacttcctttctttgtatcattgtctttgcttcatacacagttctaggatagctcatactttgcatactgcaaacttgatctccattggccagccagtgccattagactcccaactacttcggggcagtcactgtcctattccctgcttcaataaaaggaaaatcagcccctagaacaggacctagtacaactaagtgcacaataaatacttgttaaatgaatgaatgaatttcaagacgcttgagaccactggtaagaattttgggtttccaaaaccctccccttcccaacccccattcggtaagaatgctttcgcattagcatcaggtccgaggttactcattagaaactgggcaaagccggaaggcggccactttgcagcaaagaagccctagaccttgggagtcaatcaggccagcccaggccgcaccacggtctcctagttgacagttcgaggggcctcgcgggccgcttgcttcgtcagcttacagggatcccgcacgccaggtgagcccacacactgagcggacattggggcaggcaggcaggcgccggggggcggggccagcgtcgccccgccccgtcctgcctcgccctgttcgcgcgtccgctgtcyggcctccggtcacgtgacagcagcgcaggtgagcgccgcttccggggtcgggcgcctggatagctgccggctccggcttccacttggtcggttgcgcgggagactatggcgtcctcctcggtcccaccagccacggtatcggcggcgacagcaggccccggcccaggtttcggcttcgcctccaagaccaagaagaagcatttcgtgcagcagaaggtgaaggtgttccgggcggccgacccgctggtgggtgtgttcctgtggggcgtagcccactcggtgagaaccagccctagacccccgcagccctgtccaaacccctcggctccgaggcgtccctgtttccaggctccagcctccggagccccacgcagtgccactcccctcccccgggttgtcttggtccctgcccaccaaccccaggtgttcccccagcaggttttctgactgtggacttttttctccccaacagttctttactgctccactctagttccaccttccccccgtgaaatccagctccctgtgctttgactccttcctgccatgtctagcttcagcctcaggctacgcggactggccaggaccgggcgcaagcggggaggacattagggggagtggctttttctcgggtggttgttggtgagagtgtaggtggagggtgaggggccgaggggagtagatggatgaaaaggttctttcactttgctttccaccttgcttcccagccccggtccttggcttttgaatcttggttttgtctcggggaagctccaggtttcctgggctttctaatcctgcttgtcccttcctttcccttccagaggtacagcattttagagaagctaccccaccctgagctagaagttgcacactctcaggacttatgtatatatgcctttggtcttaactgcatccttatcgctggctagagcgatcgtgtttggtgtaggtggtggcgattgttgaccaaagagaaggctgaggggctctgttcctgaggtcactatggtggtgaacttttgaagcaggaaactgctctgggagtcaggaggaggccaaggagacctccatcccctttcctgaggatacctcagctgaaagaagcacagccattgcccatcttccgtcaggtctggagtgggagaaatgcagttatcttgaatgtgacacggaatattttcgaaatcagcgttcttgaatatagtcatggctaggctgtggagatggaagttgtgaggaagaatacgcgttttgtcacatttttaatttgtggtaaagaatttcttaaccaaaaattaagaatgttgtttgtggccagtcggatctcttttggatttgtggctctctgggtggtaagctcttagtgagtattcagtggaaggcacttggtatgggraaggctgatggaggtagggctgcctctcatatgtaccttccaggtgattcatccattccctgtgggatgcttaacagggagggttttcccttgttaaggattgggggagttacatgtaagacctacctcagcttcactaggtatatatactttagccccagcaccccaccctctgccaacacacatctacttcaagtgtttggaatggagaaattccttgaacatatgtcttagtgatgattcagcttgcttagcaggtggggaggagggggcaggaggagctatagctgaattttaggctgggagtctcaagtggctttttttttttttttaatctggagggatatgttctgtcctccttttctactgagaacgggaggagttggttgcactgcagtgtgtgtgatttaggttagactgcagttcatagcctctgtggaatgatctagtaaggataggcaaggcattcatttattcaattaatagacatgtcaggatcactgtgtgccaaacattgtgctagttagacacctgaaagatgcagacgactagaatgagcccttgttcttgaagagctcacaatctagatgggagaacttacataaactagtgattagagtcatgcagtaacaaaggcaggtgaaaggtactgtagcaacaccaaggagaaagcacggctcaggatttttaagtactagagctccctttctaccctgaattagcagactgcagatcctgggggccgaggagagcatgtgatgcttgtgtcctttgggctgtggattagtttggctttagggaacagacgcctaatgagctcatatcctctgattgcctgcattcgctctgaaatcagctgctcttcctttaccttacacctagacaggtgggggcctactgcaaacaactgggtcagagtggtctaggaagactggtcctgtttgcaaagagatgccttttgcaggatatggacatttatcctttttgctgtggttggccccacagaatcccattaacactcttgtgcatttttaaaatgcctttttttttctttttctaatggaacatgtagctgccttgagcttgcagagttttttttttttttttttttttttttttttttctagaatttctcacagctttaaaaatagtcctgagttgcttacagggttagcctaatataaaatgactgttgtgagcatgaagttccatgggggtgggcgtgttgggggctgtgtgtgagggttgcttactgtagtccttcttgggcagcagaagggttagacacattctctcacttctgtcaagcatatgcatagccagtgtttttaaaggaatgaggtctgagtggcccttgcatgactgctgcccagacacagtgtatgggtagctctccacacccttcttcatggcttccctattcatggtttggcttatcagatcaatgagctcagccaggtgcctcccccggtgatgctgctgccagatgactttaaggccagctccaagatcaaggtcaacaatcaccttttccacaggtaagtgatgatccttgccattctcatgtcaaccttcccagaaaggagtaataaataattttaaaagtttcagtgagttgaaaatttaacatccttcccaaatgcagaaattagttttgtgcaaggaaaccatgagaataatttctggtgttccctatatccttatatgaatcagtgttatctctcctctagcctggcaattccatagagtaaatatgtacagataccattacctgctctttctctctttttctgcttgtgaccttggagatgccatgagaaccattagcttctgacagggactccttgaaagaaaaacttgaattctctactaagccctcctaggaaaagaagatgccattcaaaacagtggtgtctgttgctgactttagaatgcttctgacttgcttgagatttgggaaatgctgctgtttggatgggtagtagatcctggctctactataccacttaccaaccatgttacttaggcaggtcactgaatcactctgagacagtctcctcttctataaaatggaaataatatgtttttataggacctcacaagggccaggygtggtggctcatgcctgtaatcccagcagtttgggaggccaaggcgggtggatcacttgaggtcaggagttcgagaccagcctgcaaacatggcaaaaccctatctctactaaaaatacaaaaaattagccaggcatggtggcgcatgcctgtagtcccagctacttgggaggctgaggcaggagaattgcttgaacccgggggatggaggttgtggtgagccgagattgcaccactgcagtccaacctggcaacagagtgagactctgtctcaaaaaataataataacaaataaaaattaaaaaaaaaggacctcacagggttttatgagaatcaaatgaggtaatatgtctgaaggtactttataaactaccaagtgtatgtaaatgtaatattgtttgttttcttactttgaaaacctgaatttcagggaaaatctgcccagtcatttcaagttcaaggagtattgtccccaggtcttcaggaacctccgtgatcgatttggcattgatgaccaagattacttggtgagagtccattaaggggtgagggtagccctttctcyccagcaactgaggagtactatttgggacagccatatttggagaaatgagagtcttggcaaatataattctttacctttttgtgattgcagcattttcaaaaatttaatgaaaattataaaccttgtccttgggggaaaagatgtagatacattaagaattttggccaggcgctgtggctcacgcctgtaatcccaacactttgggaggccgaggcgggcagatcacctgaggtcaggagttcgagaccatcctggccaacatggcaaaaccctgtctctactaaagatatgaaaattagccaggtgtggtggcgcacgtctagtccccgctacttgggaggctgaggcaggagaatcacctgaacttgggaggcgaaggttgcaatgagctgagatcgyaccactacactccagcctgggtgacagagcgagactccttgtcaaaaaaaaaaaaaaaaagaattttgcattcagtttccttcagtccacatatggacacctgatgaggaactgtgctgaatctcctaccccagggattcatccactttcagctgaccattttcctatgacttgtttctgcatataaagagggaggaaaagagctctggcctattctgtgtccccaggtgtcccttacccgaaacccccccagcgaaagtgaaggcagtgatggtcgcttccttatctcctacgatcggactctggtcatcaaagaagtatccagtgaggacattgctgacatgcatagcaacctctccaactatcaccaggtcaggcctctctctagccccattctttccctctcctccctactcacatatagctcagctattgtcagtaatagatgccaactggggagaaaactcattggaagagagaatccataatcatatccagccctaaatgggatgagggaagctattctgtctgataagatttacaggctgggggcagtggctcacacctgtagtcccagcactttgggaggctgaggcgggaggatcacctgaggtcgggagttcgagaccagtctgaccaacatggagaaaccccgtctctactaaaagtacaaaattagctgggcatgatgrctcatgcctgtaatcccagctgctcaggaggctaacgcaggagaatcacttgaacccgggaagcggaggttgtagtgagccgagatcgtgcatttgcacttcagcctgggcaacaagagcaaaactccgcctaaaaaaaaaaaaaaagattaaaaaaaaaaagatttacttggaatgtggagtttatggaatgttttggcagtaaaaacactcttcttgaacrtctctactgaagaaaaatttcaccaaaatcagtgagcaaggaatacatcagagtccaaaaggagtctttggtttatgcaacaaatattgaatacctcttattaggccctatgttaggcagtagagtaggaggtaaatgaaacatctgtggcccttacagatcccttggtctgatggcagtgaccagtgacccagtattagcacaccgcaagatatatacaatagtagaagtctgtacagaatattctgaagctagtgaagagcatccgaactcacctggggaaggaaatgcacctgggaggctaaagagagttttttagaggagatactgtaagagttgatccttgaaggactagtagaggttaaccattggacagggtggaagagcattctaggcaaaggaaaacagcacttgtaaggcacagagccatgagagaacttggtgttagaaaacagcaagaaattccatttggatgggatgtagtactgtggaaataggcaggagccagattgtaaagaggcttataagccccacaaagaagtttggactttatcctgaaggtggttttgcaaggggcgtgatatatttgttatttagaaatatttagaaaatgtgacagcgttttagagaatggattggtgggagggaacactggaagggtggataccagttaggaggtaattttaatagtccagggtagaaacaatgaaggcctgggggagcgatggtggtggggatagaaaggaagacctatgggagaactgagagttaagacacaggggcctccaagttcctggttagggataactgggtgcctattcaccagaaattagaaacagaggaacaggtttttggaggaagaaagttctgatttggacatactgaatttgaggtttctgcaattcatccagatgaggatgtccagtaagtggttggggtatgtgtacagaattcaggaaagaggattrgactgggagtataggtttgagaattatatgtgagtaagtgatcattaaaaccatggctatagatacgattattgtagggaggttgtgtgcagtgaaatgaaaagaaggttgaggacagaacctaaaggaacaagtgaagaaatgagcccataaaggaaactaagagtagatggacacttttaattatttatgccatgctacattccatacgggattcgacgacagagaggaggggaatcaggagggtggtataataagagctgaggatgaggagacttttaaggagagactggtcaataggatcaagtgccacaaagctgaaatatgacaatgactagaatacttactagatttgacaactgagggatatgggggagatttcagaggagaaatgaggtataaacctgatttcagtgattcaacgtgtgaatgagagacaggaaatggatttcttgctgattactttcctgagaaggttggctgtgaagagaaagaggcagcaacacagaaagagagatggtaagcactgaaggagtaatttttgttttttagagacaggatctcactgtgttccccgggctggtctcaaactcctgggctcaagcgatcctcctgcctcaacctcccaagtagctgggattacaggtgtgagcctggcttaacaggagaatttttaaaaaagaatccaaattgtaggccgggtgcagtggctcacgcttgtaatcctagcactttgggaggccgaggtgggcagattgcctgagttcaggagttcgagaccagcctgggtaacacagtgaaaccccgcttctactaaaatacaaaaaattagctgagcgtggtggtgtgcgcctgtactcccagctactcgggaggctgaggcaggagaattgcttgaacctgggaggaggcgggggttacagtgagcctagattgtgccactgcacttcagcctgggcaacagagtgagactccatctccaaaaaaaaaaaaaaaaaaatccaaattgtaggccatcatgcagactttttttttttttaggtataaaaatctgtatttatattacagtgacagaatgacacagcacagcccaacccaatgcagacattttaaattatgggaatctagcctatgaagaaacactgctctagataaaatgatttcattgataagatataagttgtaatcctggttctgtgccacttgcatatagaaagggtctaaaataaggataataacacttaaccttcctcatctcaaagaatgataaaggtgaattgagagatgacacttaaaaattaagagatgtacaaatggaaggaatcagaggaaagggggattcagaaacggcatggataacctggagtgttttggggaagcttccaccacttttgactttgtaatctctctacttgaagtcctctgctctaccctggaatggcagtgtttgaacttccctgggctgtttgtgtatctgctactcagcctctccccattccttccccctctttcactgtagtacattgtgaagtgccatggcaacacgcttctgccccagttcctggggatgtaccgagtcagtgtggacaacgaagacagctacatgcttgtgatgcgcaatatgtttagccaccgtcttcctgtgcacaggaagtatgacctcaaggtaagaagagggtagctcggacttagagggaggctcctgatagcctgagaatggggaagaccctgggaggtctttggatgattccttttaagggaaagaaggctgggtttgagtactcatcttaggggctgggttctgactgttcttttagccacttctactgacttggtgtttgggtctttctgcagggttccctagtgtcccgggaagccagcgataaggaaaaggtgatagtaattttatgtgctagggtgagggatgagggatgagggagggcagatgaggggaacttcttaggatggagaggccactctatataggaatagggattactagctatttattatcttaaaccacttaaaagaagggggtaaacttctgttgatccggggattgtttggaaggggcagtgggagcagctgctttaacactggcatgggttattccatatggaaggcttggggatgggtgaggttgccagacttgaagagcaaartgtttaacttccacttcccattctgggttattttattcaagcagctacttttgcttaagaagacacaggccgggcatggtggcttatgcatgtaatcccagcactttagaaggccaaggcaggactgcttgagcccaggagttccagaccagcctgagcaacgtaatctctaccaaaaacacaaaaattagcygggcgtggtggcacgcgcctgtagtcccagctacttgggaggctgaggtgggagaatcacttgagtccaggaggtcgcggctacagtgagctgagatcacaccacttacattccagcctgggcaacagagtgatcgagatcctatctcaaaaaaaaagaggagaaagaaaagtcagcctggagggtcttggctaaaaaccataagcagagagtagtgggatgtgatttgggatacagctgtagtgactgmgtctgtggaagtcactggaggtgagaacagaccagggaagcatcacagtgtggagttagatgagatctaactgagctagcatagagccctagacagaaggtggggttctgagaccttggggaagggatatgttcccaagatgtccctttacatattcttaggttaaagaattgcccacccttaaggatatggactttctcaacaagaaccagaaagtatatattggtgaagaggagaagaaaatatttctggagaagctgaagagagatgtggaggtgatgattgggtgctctgggaaatrgctttcctttttttgctccctagagggtagttgtctctttcattcacggtatgagggagctcctccccttccctttattcttcaggtcctctgcctatatgggggtttagtatgagacatgaaaaacccctggagctgacccgtggaaggggtggctggaataagctaaaaggatgatcttagatactaggacatataggcactaaaggcagtggtatgccctgcaacctcaatttttatacttcctttccccakaagggccccagaaattcaaaggtayaggtacaggggtgatacctagcagtgaagagtgagagagaggtgtctgatttgtcagtgggtctcagtttctagtgcagctgaagatcatggactacagccttctgctaggcatccacgacatcattcggggctctgaaccagaggaggaagsgcccgtgcgggaggatgagtcagaggtggatggggactgcagcctgactggacctcctgctctkgtgggctcctatggcacctccccagagggtatcggaggctacatccattcccatcggcccctgggcccaggagagtttgagtccttcattgatgtctatgccatccggagtgctgaaggtgagagaaccgggacaatttaagggtggagaggggatttttcctggaggacagagaccagagtgctsggggagagcctgattagcttttcagaacaaaactgactgcttcctggagaaagggaattggaactaaacctactctgaattgttggtctctctcccaggagccccccagaaggaggtctacttcatgggcctcattgatatccttacacagtatgatgcyaagaagaaagcagctcatgcagccaaaactgtcaagcatggggtgagagttcgcaaaagcctttcctttcctgtcttgactattctttgggaatagagtctcttgtgccagagcaatggggtggcaaaagaatggaggtggtctggggtagattgggtgggggtgatggggacgggtgctagggtggcctgacatattgttccgtatctcctctcacaggctggggcagagatctctactgtccatccggagcagtatgctaagcgattcctggattttattaccaacatctttgcctaagagactgcctggttctctctgatgttcaaggtggtggggttctgagacacttgggggaattgtggggatattctagccaccagttctcttcttcctttgctaaattcaggctgcaggctccttccatccagataactccatcctgtcgagtaggctctttctgaccctcagaaatacattgtcctttttcctctttgcccatttttcttccctctcttcctccccatgagaagtctgcttgtagtattagaatgttattgttgactctctcccaagtgccttgatctttgtaatatctcctgttgtttctatgatataggagctaggggaagggggttgtttgccttcttcaggacctgactggacagatggacctggctcaagcaactactctggatgcactttgctgtgtgggatgaactaaaagtgtctgaattttgctgataactttataaaactcactatggcatgcttccctcctggtgggccctaggatggatgacactcaagatactacagatgtgggtgcaggcatgcacacacacgatggaatatggccattcctacacaggtggggtagagagtgggtcagcagcctggcacctcacagaggtgggacctaagaggactcatgattatgcagagaattggattgggtctctgtcatagattgagtaatctcttcccttacctcaattccatctccacccatctctacatctgggcacagcaacccagagatggccaaaagcattcaagcctgggggaagatgtttgactattgctgctcttcaccagaacctcacacctctcctgggactggaacccttcagtgggtgtgtggccagttttggaggctggaatgatgggccagggtgtaggattcattctccatgtaaagtttcctttcatcctgcctagccatccccaaggtttatttccagaagaaaggaatatctctacttggatcaattctggtcatttcaagaggatggaggcctcaagtgtgggaacttcccctactccctggatgtgtgtacctagcacacttccttctcccacccctttttccagttggatttgtttttctgttctcttctgtcctgtcttatactgcaactgtgtctcctaggggacagatggccttctttgtcatcttcactctccacccccagagaggagtcagagccataactcaatmactcagcccctccaaagatagttratgtgtgataatctcataatgttgagaaccctgatgagatacattgtcttcctctccctacaatgcctctggggccaaggcacccattcttcttgctatcctccatcccccttgaggcttccactttttttttttttagacataaagctgggcatcagcaactggcctgtggtgatgcaaagctgctttgctctgtatctggctggactgatctgtctcacaagaagccatgaggccatagggagaagctccctctccccttcatcttctgctccaaaggtggtagcaagaggagtacccagttaggggttggagcccccatataacatcttcctgtcagaagactgatggatctttttcattccaaccatctccctttcccccgatgaatgcaataaaactctgtgacaccagcaaccattgctctttagaaatgggttttctgatcatatggctgatgtgttatgggcagtatggatgtcttcatttgttgcttctgtttttcatcttttttgttttattaataaaaatttatgtatttgctcctgttactataataatacagggaataaattattcaatccaaatttctgtacagaaatgccttttttttttttttttaaatttcacttctctcagggagcctgtgtttaagggtgcagagaccagctgaagaattctggtgttcaaggtgttgggcccctaactaaggatgtgggtttctagacagatggctgtgaacttttttaaaaaggctgtgaagggtgtgcacgggaatggaaaacttagtctttaaccttgtgggaggtcagcggtagtgagggccagggaagagtagggtgatgggacccttcctcttcccagagttctgggcttgctaacactccatctttgtaaaggtgagtaggcctctcagcccaccagctaaaagaaaaggaatctagtattcccccaggcttcctgggaaagctgtcctyttcctggagggaaggaagagtacagcagggtcctgggaaagtgaagaaagtgactagccctccagtctagaggggggagtgaaaaaggggtggatgaatagaggttgttgccagtttgggagattcctgcctgtcttggctgaggaagtcttttggctggtggaaaaacctggcttgatgtggcyccagggaagtgagttggattgggcggagactgcttgatgtgggaagcagagcagagctttttttttttcttctttgagagtttttaactctatttgaaccatacacttgacaccaccaccacctcgagccactttttaaaaaatgtattcgcttcccattctgcaccagcctccatatccctgtttgtggaaagaaaaatcagaggcactgaccaatgatcatctgagagcaggttgtgggggtcataggaggtaacaatctagaaagaggcaggagatgagggaggggattgaaatagtttagtacccggatttgtttattttttagagccaatgcttttctttttactatgactcttcccatcccacattgttcctcaaaggcccttctaccataaggattcaaaaaattgccgccctccccccgaatccccatatacccaccaacacttcacccacccatccaccaccagctcctgggagctgctacgcagctggctgggaaagaaaagggagagtgctccgccgggagcggggagcgagtagggtggcgtctccagggatttaacctcctaccctcagttccatgacgccaccccctccctccaaagactgggacagcgcctccatttttgttttggggaggaagggcaggggcttgcggatagaagggggtcaaaggaacggtgattatcacctgtgaggggaaagggggtgctgtcctccctccttcccttttcctcagcctgcaccccctgcaatcccccacctttcggggtctccccctccttgttgctaaggcccggaccgtcatcccagcaacagcctcagtcatgtgaccggcaatggcggcgctgacgagaggtaggtgagcccggcgccccccacacccaccgcgcgccccccgggccccgctcgcacccctcacgcgccccccgctcccccggcgccccctcctccacctcccctccccgcgcgcggctccgggctccccgctccgtgcccggccgatcatctttctagcaccctccagccttggcctccattcgggggttctgagggctgcgatcgggccgacatgcacccccacccggcggtggggatccgggggctttggctactgagggatgtggggagttggttccgggtcgggtcttggaggaggccgtsgggggagggcgggagctgcttcagtggatgcccccagggacccttgcccatccgggctgtgcctccctctggcctctgtctggagggagagactggttccttgtccggcctgggttgccacagaggaatcacagacccaccctaaactggggcyccgcctcccttttctgtgccagcaggacttggacctaggacacctaggtcctgggtcccccgtgatggggagagaagtgttgcatcgcggatagactgtatgggctgagactctagggttccattttcacttatgaatctcgaggtgcatctggccttgggggacgatgatggaggcatgaagggacagctgctccttcttggatcagtcaataaatggaggtcacactaatggcccttctttctgtttgagctgcatttggaagtgttgtggagacagccccgtagcccaatgcgaccagactcagggaaaacatcaggcccctccagctgagcccttgtgtgagccccgcccctccctaaatgccagacttgggagctgacagacagcactgcctgtgctgggtttaaaaggtgacaatgagaactttgttattgcaggrgcwgctgccactttgttcacatccttaacagacttcagcagaagggactgagttagctctcaaggaaggctccctggcaataggggctgaattatttggcaatgtggagcaggcgaggagttggggagcataggaaatattccggtccatgtgatctgagggaggtggcaagaagacctccacctgtgtgggcgttttctttcctgacttctcttatgtgtgccctaggctttcttgggggcctcagagctggggaagaaaggaggaaggttagcatgttgaagttccttcttgagcaacttggggagaagctgataatggaattctgcagagaagagaggagatggaaggggagtttttatttctgggttggctgaggggaatggtaacatttgccatcataactttttacccttcccccactcccagtcctggtcagctgagtggaaatagaaggatttctgctgccatcatcttccatgggctttccaggtatctcccccgcaagggatcctcaattttcacccttaaactggtttccttcattccatgttccaagtaatgccattcttagtaacctatacccaggtttctgtctctgttccatgggctgctgggttgggggccatgggaattgggagaaggggtttctcactttccttccatttttccgccctaccaggtcacacgacctacaagtagggagcagggaaagaagagtgagcctgcatgccaattctaagctcttcaggatcaaagtaagcaaaaaggaggggcaaagagtctccctcccctttaaacagcccatttttccccaagaggtgggaggggcaaattgtttctatgatctgggagaaatgacaggagaaacaagactgatacttggcttagatgataatatagctctggaaacttttttgctcttcagtgggttttgggtttggaagataaggggagacagaatatgaatttgggtgaagggttggggattaggctttgagaaaacagaggtaatagagggtttggaaggaacctgaagtaggaggcactgatacttgtcaaatggggaccccccaccctgagtccctttcaccctgggggcagtgtcgttcgtcctgtccagaatggcagcctgtggaggcacctgcaagaacaaagtgactgtgtccaagcccgtgtgggacttcctgagcaaagagaccccagcccggctggcccggcttcgggaggagcaccgtgtgtccatcctcatagatggcgagacttctgacatctatgttctccagctttccccacagggtcctcccccggcccctccaaatgggctctacctagcccggaaggctctcaaggggctgctaaaagaggcagagaaagagctgaagaaagctcagaggcagggggagctgatgggctgcctggctctggggggtggaggggagcaccctgagatgcaccgygcaggcccaccccctctccgagcagccccacttctgcccccaggagctcgggggctcccccctcctcctccccccctgcccccacctcttcctcctcgccttcgggaggaggcagaagagcaggagagcacctgccccatctgtctgggggagatccagaatgccaagacattggagaagtgccggcattcattctgcgagggctgcatcacccgggctctgcaggtgaaaaaggcctgccccatgtgcggccgcttctatgggcagctggtgggcaaccagccccagaatgggcggatgctggtctctaaggacgccaccctcctactgcccagctatgagaagtacggcaccattgtcatccagtacgtcttcccgcccggtgtccagggggtaagaagaccatggcctgcccttaccctttggctttccccaagctctgacctaggaaaaccgggtgagggtgagtgtgcttgttagatgtgagacagtcttgctgtcttccactgtgccctcctactcagtgccctggacctaggaggtccccgtgaggcccagcctttccatccctgtgatcccaaggcacacgtgaaaatcagatatgagctaggaaaaaaaaaagcaaatcagatatgagaggaaggaattgcatattatttccttgatgaacacaaatactgtgctgacatcttggcagaggtaaattctgtggaggtggtggcttaggggaagggaggcacaataggaagggatctgaccaacccaacagagccaggagcatcactctgtaaaaacaggagtagtcaaggcctataggtgtcttcctgctggacaaagagtaatgtgcaattctggctgcagaggggtgaagaagctgcacagaagagtgatggaaaatggaacaagttagacagtggcagaaacattaggagtattttcaggtgaagggaaggctgaaagatagattattctgtcttcacatttttgctgagttgtctggagtgtagggaccagctaacttccatcacttctgagaatccatttgttgctgaatggagacttgagggattgagacagcagaaaaaatctcttaacacataaggattatgctctgaaacaggctcttgctgccgaggccgtataatctctccttctgtggaaagctgtcagcctgttgctgccccgttcgcattagctgggggtgctcagacagagactagcctggatgaccctcctctggcatctgggccttaggatgcctggctgctcactgcccactctgcttcaccttcctcccaggctgaacacccaaacccaggagttcggtatcctggcaccacacgggtggcctacctcccggactgccctgagggcaacaaggtgctgaccctgttccgcaaggcgtttgaccagcgtctcaccttcactatcggcacgtccatgaccacagggagaccgaatgtcatcacctggaacgacatccaccacaagaccagctgcacagggggaccccagctgtgcgacccctcttcatttcctttcccttggctcctcccctttgttccatttccactgagggacccaccaacccctcgctcacggagcctcctaactggagagaaccacttccaaactgttcagccatctcagtttctcctacattcaacctggtcctggtgtgcccagcttagcctacaaaaataagcagaactgggctaaattatcttggatttggaggtgtcctcccttaggggaggtggggaggtgtctgagccacctagaatgagggtgagcatggggataatagcaagttcaaacagctaacaaccctcaccctcatttctctttgctcccaggtttgggtacccagaccccacctacctgacccgggtgcaagaggagctgagagcgaagggtatcacagatgactgaaggacatcgcctttgccaaggcccctgctgtctgcctctactaggacccagcagaagcctctttctcctctctgccccctgccccccacaccacacctgtaggggacctgtctgactgggaagggagttccgagagggagggggcaatcccttcccccatcccccactggccaagtgtttcaatgcagtgtgagccactcccttctggcagaggccgacctccaaggctctgttctcccctccccgtgtacatatactcccggtttccctgcccctc

SEQ ID NO: 95898 - DNA, 51429 bp, Homo sapiens
  misc_feature (1)...(51429): n = A,T,C or G
agttagcctctctatgcgtttcctcccttgcaacatagggttactaaacagcacatacctcttagggttattgagttaaaaattatataaatctttctttctgtttttttttttttttttttgagatgtatcactctgtcatccagtctggagtgcagtggcacaatcgcagctcactgcagcctctgcttcctgggttcaaacaattctcctgcctcagtctcccaagtagctgggattacaggcatgtgccacaacacctggctaattctttttgtatttttagtagagacggggtttcaccatgttggccaggctggtctcgaactcctgacctcaagtaatctgcctgcctcggcctcccaaagtgctgagattacaggcgtgagccactgcacccagtcaaagttatataaaatttttttttttttttttgagatggagtcttgctctgtcaccaggctggagtgcagtggctcaatctcggcttactgcaacctccacctcccaggttcaagtgattcccctgcctcagcctccccagtagctgggattacaggcacccgccatgttttgtattttagtagagacagggtttcaccatgttggccaggatggtctcaacttcctgacctcaggtgatccacctgcctcagcctcccaaagtgctgggattacaagcatgagccactgcgcctggcccagagttatataaatcttaatacaaggctgcatgatagtaacctctctagggttcttagctgttagtgcctagagcatagtggatgcacaatagattgtggccactgttacgattcatttccatccttaatttgcaagtagctctgaccttgcaaagtcctaaggctgcttttttgtttctggtttctagttacttcagggtctccatttcactgatgccttcaaagagtttgcagtggtgactttgggttggtgccctttctgccaatttatctggtgtctgaacctgggttccagccactgctcaggtctcctgctgtttgctcttggcctggtgttggcattctttgttctgagcttcatgccttattctcagagcccatctcactggcatagtcagacagaccagagtgaagtttccgttctgatactcactagctgggtaaccttagacaaaggatttaatcccaattttctcacctgtaaaatggggctaataatgcctgtcttacagggttatctaaagattaaatgcaatcatgtgtttgtaaacattcagtatgatgtctgccacacaacaggtgctcaaataatgtttgtttacttctctgtctacttctccctatggaataaattccataatcattctgaactggtgtcttagtccattttgtgctgctgcaacagaatacctgagtctgtgtaagttataatgaacagaaaattggctcatggctctggaggctgggaagtccaagactgaggagctgcatctagtggaggccttcttgctgcataatttcatggtggaaggtggtggagagggcaagagagagcaagaggttgaactcacagccttgagcccttttataatgggcattaatccatttatggtggtggagccctcatgacttaaacacttcccattaggccccacctcccaacactgttgcattgggtattaaattacaacccaagctttttgagagacacattcaaaccatagcaactgatatactgatctttattttttatttttttagagatggagtcttgctctattgcccagactggagtgcagtggtgcaatcttggctcactgcaacatctgcctcctgggttcaattgattctcccacctcagctgccccagtacctgggattacaggtgctcaccaccatgcccggctaattttttgtatttttagtagagatggggtttcactatgttggccaggctggtcttgaactcctgacctcaagtgattcacctgcctcagcctcccaaagtgctgggattacaggcatgagctgccacacccggtggtatactgatctttaaaagggagaaataatcttccctactagttaccacaaaatatcttctctccttgtcttcattagtattttgattttattggggggtaggaggaacagcaatgtacccaaataaagactacgtcttcccacctccctcgcaactaggtgtcatcgtggatctatattttggtcaattatgaaaaaagaagtgtttggtggtgttatgggttgaattgtgtccttgtaaaatgttatttttaagtcctaacctccagtgccacagaatgtgaccttatttggaaacaggactttgcagaggtaatcaaatttaaatggggtcattaggatggaccctaatcccatatgataagcatccttattaaaaggggaaatttggacccagagacaaacacatatagagggaagatcatatgaagacacacagggagaagacggccatgtgactggagtgatgcattacgagccaaggaacgccaaggattgccagctaacaccataggctagaagaagcaaggaaagattctctcctagagccatcagagagaacatggccctgccaactccttgactccagactcctagcctccataactggagacaatacatttctgttattttaagccactcatttttggtactttgttatggcatccctaagaaattaatactggtggaattttgggaagcctgaataaaatgatgaacaggaaagtatttttcaaactctccagttctatgtactaataaggcatttttattattgcaacgtttgtgactatgattactcttggtttatgaagaatagattgacttggctgacatgattctgactagagatcagaagatttttatcctgcttctgctccatgttcttgagggctcagcacagcaatcatagatgctacaacagcagtagcatgagagacaagcagaagagaagctaccagcttttgggttggatgctggcaggatgagtgtgtaacttttgtttagctggggccagaattctcagccactgattggcagtcaagcataaaggttaaaggtcagaattggcttgtatttaaatctagtcttcacctttacttgctgtgtgatcctgggcaagttattgaacttttctgagctttatattcctcatctgtaaaatgagaacaaatgtggctcctgtgacatagggttgtcatggagtttcaatgacatcacataacaagcagggaaaaaagaaaaagccacagcctatctgtactcagtccagggtgcagatttttctgctctgattacttactcttgatagattccaaatggacagactggattctggctcgtttcttcttacctctattgattcattcagtaaacatattgaatgtacctattatgtgcctactaggtgatgaaaaaagctggtagggcagacccagaccatgacatccaaatgcagacagctcagagaatgatttaactaaaagtagagccaaagttattcgggtgctcctctcctctcagtctaatttttttttttttttttgagacagagtcttgctctgtcacccaggctggagtgcggtggcgtgatctcggctcaccgcaagctccgcctcccgggttcacgccattctcctgccccagcctcccgagtagctgggactacaggctcccgccaccgcacctggctaatttttttttgtatttttagtagagatggggtttcaccatgttagccaggatggtctcgatctcctgacctcgtgatcctcccatctcagctaggattacaggcgtgagccaccgcgcctggccctctcagtataatcttttagggtttctgccatggccgtcctaatctacccttcctgattggtagatacttgttctcatactatgttgcaaatgactattaatctcaaagaaaggtcctgcaaatgactgtcctataaagctgcctcctgaaatactactcctatgcatagaaaacaagatggttccaggcagaagggcccagagaaatcagtctgaaacctctcagttcacagggggaaatcaagccaggcagaagtgacccagatccagttagggtgactcagccaaggacacccagcaattatatgtcccagctgggtagggagcagaaaatggctctcctgcttctggtccctgccccacaccatttgtgtactgagcatgttctaactaggttgtgcagtgtcctagggagatactaaggcgggacaagaagtgcctctgatttaaaaaaaagtctacagcccactgggcatggtggctcacgcctgtaatcccagcactttgggaggctgaggcaggcagattgctagagctcaggagtttgagactagcctgggcaacagggcgaaaccctgtctctacaaaaaatacaaaaatcagcaaggtatggtagcatgcacttgtagtcccagctacttgggaggccgaggttggaggatcacttgagcctgggaggtggaggttgcagtgagctgaggtcatgtcactgcactccagcctgggtgacagagccagatcttgtctcaaaagagaaaaaaaaaaaaaaaagcccacagcctagcaggggacatgaagacatatggtagaccaaaagccctttggcttcattgatttgaaatgctgcctccattgtgtaccaatctccaatgtatatgggactgttgtagaccctgttctgttttaccactgtctcttcctgctccagcaccatactgttttaaagactgtagttttggccgggcgcggtggctcacgcctataatcccagcactttgggaggccggggcgggtagattactggaggtcaggagttcaagaccaccctggccaatatggtgaaaccccatctctactgaaaatacaaaattagctgtgcgtggtggcatgcgcctataatcccagttacttgggaggctgaggcaggagaatcgcttgaacccaggaggcagaggttgcagtgagctgagatcgtgccattgcactccagcctgggcaaaaagagtgtcttgactgttcttgtacacttacttttccagatgaacttttatatcagcttttgagtaacacagctattgaatcttcctcagcattcttgtctatgccaggcaccaggctcttgagcagggtattcagtccttgcccttgggaaatcacaaactagatgcaaagtgtaaccaaacaagaagtgtaaaataacaacaggaatctcacgctatgggtaacaagaaccaaatgagtgaggggtccagacagactaaatgctgtgttccttggggccaggcaagtcatggaaggttcaacagaggtgacattatacaggactttgatgggtgagcagcagctttcggtatagaagaaatgctttgagttgaggaagtccgggaaagcttcttggagaaggagacacatttctattgagagatgagtaagagtttgccgggttcacaggatgggataaagggagggattgccctgaactgggaaagtcacaaaaaggttctctgaagacattttagatgcgttttgagttggagtcggggaagatgcctggaagaggcaattaaataaaaagaattttattacaaaagtaatacaaggacatgtcattggaaccgggtttcgagagatgagtgagcagttcctgacgcagacaagagctggaccacgaagtaagttgaggcagaggcagaaaaggcttcctggtcctgcccactctctaagacctaagatgcagggtctaagtgtctcacctgcgtggcggcggccctgtagttctgacttccagcgtgaggtagccaccgccaggcctccgggggagaagactacagtaagggcgagcagagctgaatgctttatgtcggaatcgaccaatgggatggcggcacccggttgccagggctacggccaagcggaggtagggcctcggcactatgggcggggcctgggcggggttatataagccagcggcgggcggaaggcggggcgtgggggtctgtggctgctgggctggcggggcgcaggccgcgggacccgagcccggggaarcgagagagcggaggcgccgaggatccgattcaytccctggggasacctatgggccgaagccgtgtaaatgcgttttaaggcgagtgcggaaagtggcctggggagcctcggggagcggacgccctccgccctggtgctgacctgcctccctgccccttctgyctcctgtcagcagaggcctcggctccgcaactgccactcctcctcggggtgttgcacaagtttcgaggtcaccggcgacccccscyagcagcgcgcctggctctggcccccgcgaaggaggacggagtttggtaaggggccctgggggttggggggacctcagccctgcactctgtaggagtcactcggacagaaaaaacctcggccttccgttctctcccaggagcttgcggcccccacccaccgcgtggcgtccccaggcacgcctagaattctagcacctcaggatcagtccagcccccatttacaattggggaaactgcggctccgaaagggtcagagggtacccgaggtcaagcagtagagagcggactcgaacttaagctcttgctcttaggctgagacgccttgatgtggccaccggctaccctctaggtgggcgtggtcaagactgggggcgccctggaaacttccccacccaagtttctcagattttctgttccatctctctctcactctttcctgaaatccagaatttcagaactgggaaggctctccaaaacaattcatccattttacagagggagcaactgactcggagaggcagtgacatttgggcatacggtgccttgtctccgtctgaaatccgggattcttgactttctccacccttgcccagtgaaccccgggcttgtgctgggggcgggttgtgacgggattgggatccctggcctcgggaggcgagtggggcagcagagccggccccccagcsgttcccttcatctccccncgccccgcagtgtgttgcatactttctaaggcggcggctgcagcagmggctccatccagcccgtcagctcctcctgcaaggcatggctggctacctgagtgaatcggactttgtgatggtggaggagggcttcagtacccgagacctgctgaaggaactcactctgggggcctcacaggccaccacggtgaggggctgggaatgggggtgggtcccckgtcccctgtacagatcagctgcctcctcaggaagggtccctagggccctcatcttatcctttcgcttatttggtacgcaatccttgctatttgcaagagaggggctcaatttatccccaattctttgtccttgcccccaaacctgcccctcctatgttgcctttttacccagccctccaaggtcagaaacgggggattcctttcctgctgccccctctccctcaccgcccacatctaggcattaccaagctctgtgaattctgcctccttaaataagcctccagtgtgcttatgtggaacctcgctttctagttcagtcttcctctctccaaaggccccctgatctcccggtctcatgccaccccctccaaaggtatcatagtcctgttcaaaatctgaatttggcaattctccactgcctacaggatcaagtcagagcttccctgcctccatagccccattcccagctttccccacagtatatattatgctccttcggagctgaatgactcaatttgcatttcccaatgatgctgtgtgcccaatgatgctattaccatgcctttgcccaggctgttccttctgcctgcagcatccttctctcagcctctcccctctttacccctttctagtcattccttgcttctcatcagtgttgcctttcctgatcgccccaggcagattttctattttctttctccatgcccctgcattgcaccttgtagaaactgccatctaacatctgctgaatggacttgtaagtacttaaggggttccttttcttccagacccaagctccttcagaacaacagtactgtttggtcatctctgtcccttagcataacgtttggcaccaagtgggcatgagtaaaaaagtgttgcatgaaagggaaactgagtcccagggaagcaactctggaagggtcccttccacatttaagtaatgtggtctcacccacagcctcatacatgtttggcctttagcacatctacaatgaacagttgtccatagggataggttgcagtgtcagtgggactagcttaaggcttcattgagcacctgtgtttggaaggcagtgagctgtaggtcatagcttctgcctttagggagtttacccttttctagaatggacagatgcatatgcagttctgataccttggaagcatatgcaaatgcagtgggagcatttaaaagcagagttgccttattggtttggggaaggtggcatttgagtgaaactttaaggattttgccagacacaggagtggggagggtattctgcaggacatggtgggaacaaaggtttgaaggtgggaaaatgatccagcctacagctggagttttagccgcattgaggggagggattggggctagatcagagccttgaatgccaggctgaggagtttgccttctgccctgtaggcttggggaggcccagaaaacttagcagcagggtagctctgtggccagtactgaacctgggtcaggtacttggaaggatcacggatggcatgcacagggtgcgagctggatgggrtctcacattcrtccacttcttgtcattcaggacgaggtagctgccttcttcgtggctgacctgggtgccatagtgaggaagcacttttgctttctgaagtgcctgccacgagtccggcccttttatgctgtcaagtgcaacagcagcccaggtgtgctgaaggttctggcccagctggggctgggctttagctgtgccaacaaggtgagccctgcccgcacggtgcactgaccctccatgcccactgaacacacacatggccaggctagtccaggtgggctctggggagcaagaggtacctgtagttggtccttgccctctgggaagaccacccactcaggaggggtctcaagggatgagggagggagaaacgagcatggaatttgtcagccttgaagttccagattggaatcttctttgtccctggtagaaagctcatctttttaatggagatttgcaaatttgtttggcacagagctatacatgatgttcttctaattaaaacaaaagcgtctccatattgttggtttcttttctttttccttttataatcataataatgtgtggcggtgcattttcttaactagtccttgtagttttgttgttgccaccaattctgtctttctaatttgatttctgctgttgtcttcattccctcctgctctctttagatttatttttttcattttttgagatggtgtcttgctctgtcacccaggctggagtgcagtgttgccatcttggctcactgcaaccttcgcctcccgggttcaagtgattctcctgccctcagcctcccgagtagatgggattacaggtgcacaccaccgtacctggctaattttttggtattttcagtagagacaggatttcagcatgttggccaggytgatctcaaactcctgaactcaggtgatccacccgcctcagcctcctaaagtgctgggtttacagccgtgagccaccgcgcatagccactttagattaactttacttatctactgtcattcagtatytactgaactcctacagcrtgtagtcactgtgctaggcagggctagcaatacagaattgatagactgctgtccttgagttgaatgcttagtttatttatttctattctgtccttgctagataaaagcatttaagctataaagtttcaactaagtagagctgaaagtatctcatttattgattcagcaaatattaattgggcatctcttctgaggccaagcattattctaggtggggatttggcagtgaacaaaataaaacaacaaaagcccttccttcatggagcttgtttacaaaaaaaaaaaaaaagatgaaataaagaaaatatttagtattttagatggaaaatgctgtagagagaaagcaggaaagggaagtaaggaatgttgggagagaggattgtacttttagatagtttggccagggaatggttcactgagatttgaatacagacccaaaagagccaagggatcaagccaggtagataaccagggaaakggcatttcaggcagcaggaacagcaggtgcaaaggccctgaggtgggagcaagtccagtgggcactgctttgtgatattgtcattagcactattttcttggtggttagtaatggttgcgtaatatggctggatgttgtgaggagagttctagaaaggactcctggagtcctgggcaggatgacagggctggagcgactccaggttggggagaggtgtgcacttggccgggatggtcagaatgagcaggttaacctgtagcagggaccgaatgttaatgcctttcatggtagatgaggtgcttcctcttatctttgggctagttcatgctttgcacacctcgttttgtgcatgtcttccacgaagctctgtgaggcacacagtgggagagactgccgttctacagttgaggaaaccatggggtcagccatctgtgggtagcagagccaggacgtcctcgtttcccacttcttcctgcggtgccctgggcctccacgtgggatgaaaaggagcaggatcctttcagtccccgaggtctagggtgaagaacaggaccaaaccccactgcctagagttttctgcttcaggaaccccagggggaggagcttggttctgtagaagaaagggcagagtgaggtgttaaggctgagagagaccttgatgacagcggggactggagaagcatctgccctttgctgagtgtgtctgttgtgtcaggtactttgccaagtgttttctgtacaygatctcattttattctcacaacagccctgtgaggtaattactattttttttaatggggattctgaccgtagcctggtgaggacacatttaacgtataaggaaatgagagatggaggttccgcatcagggtggtggcagcttgagtcctgctgagttgccttggactctgttttttccaaggtggctggggagaggatggctgagctgggattcagccagtgatggatgccctcagccaactgcaggggcgaggagagacttaagccccctccctgtgatgggatcatgcagaccctttggtgcgcttctggagaggtggctccccgacttacagcttttcttggaaggccaaggctgccctcttctggtcgtctgtagtgggtggccatgcttaacagcgttgtgccttagtggacactgaccaagggcctggcgtaagctagggctggatgtgcagacagacatgcgttggacgggggccagggccacagcttgctcggggactctggtctacccagccacctgcccgaggaccactgtatcatctctcctgtcccaatcgcttgccctctgtctccctcagcatcctcccatcttaaaaagcctttgctgggcagcacatcctcttccagcccaatcccttgctctcttttcgtgaccaaactcaaccaagttgtctgcacttgcctgtctgcccccattttttctttccttcagtactccttccttaagccattgcttcccagcctccactttcactactccaaagaattttctcttaccaacatccccagtgagcacttaccaacatccagtgagcactttactttaaacatggattgtgaactaataatacatgcaaataacacattgattcattcaccccaaaagaaactaggacatcagctttatgtctccatagataatcaccaggatggttttggtggatatgtagtattttttttttttttttgagatagagtttcgctcttgttgcccaggctggagtgcagtggcgcaatctcggctcaccgcaacctccacctcccgggttcaagtgattctcctgcctcagccttccgagtagctgggattacaggcatgtgccacgatgcccggctaattttgtatttttaatagagatggggtttctccatgttggtcaggctggtctcgaactcccgacctcaggtgatccacccgcctcggcctcccaaagtgctgggattacgggcataagccactgcacccagccatatatatatatatwtttttttgagacagagtcttgctctgttgcccagggtggagtgcagtggcgtgatctcagttcactgcaacctctgcctcccaggttcaagcgattctcctgcctcagcctcctgagcagctgggattacaggtgcctaccaccatgcccggctaattttttgtttctttagtagagacagggttttaccatgttggccaggctggtcttgaactcctgacctcatgattcacctgccttggcctcccaaagtgctgggactacaggcatgagccaccacacccgactggcaatgcattctttaaaaaaaaaaaagactcaacagtaacatatggtcctacttttaaaggcttcagaagtgtataagatgaaagagaacactgcttcgaccccacctcatcaggcacttcttatagctgagacagctccttcctgtccagacacatgtctcgctgtgagacgagatttgcatttacaggaatagctttctaatctgcatattgctctccatcccttggaaacgttctccatcctcacctctgcaggtcccgggtaccatctctccccatcttctgccactctctaaatggtagcattcttctgaattcctaggcctccctgtcttgtaaaccctccttcttctcagaagaagggttatctcctcccatggctttaaataccatcaatatgccactgcttcccacattttaatctccagctcagacctatatatccagttgacttgatacgaggagatgcctggaacccggcatgttcaaatgtgctcctgatgtcccctttccccgtcatgaagggccccctcagtctgctgggtgtgggagttccctctgacgtcctcgtcctcatcaccacatgcaatctatcacccagcttgccagtcccacctccagaacacatctccccacttttctggagctggctctgtcatctcccccagggcgatggtgatagccactgactgtcactgtctattcccccagaatccccttgggccctccttcaggtagccagatagacatgtagaccttatatttaaaatgcaaatctgaccatgtcgtttcccttcctaaccctttagactctttcccatcacatgcagggtaaaacatgtttccttggcagctctgcccctctccctctgacctcatcgtcctcactgcactaacttgctcttcttgagccactgcagcattctctgttccttgatcaggctgaagtgctcagcactgcttgcctcagaacctctgcacagaccacttcctctactggaaagattcttagattctttccttccctcttggcctggctgaggcctcctgcagggctcagtttaaatatctaaccctgaagttgtcctttgcctctcacacccaggtctcttgcagcacgtactttttcttcccagctcttaaccacttgtaattccatcattattcagcgctcatttgggactgccctgcctatctttcccaccaacctgaaagctccatggtctcagagaccctatgtgctttagtcaccacttgttttattaacacctatcacagagcctggcaactcaatagatgctcaaaaatacccgtcagtgcagcattgaggttgcattccccattacagcagtgaggttaagagctggtgtgctaaggtctgacagttagaatcccatctgtgccacttagaagctgtgtgattttggacaaatcacttagcatccctgagcctctgttccccaccttataagattattagtaaggttaaatgagaatgtatataaaatacttaatgcagtgactggcataggatatgccttcaatgaatgacaacacttatttaaatatttataattaggctgagtgccttggctcacagctgtaatcccagcactctgggaggccaaggcaggaggactgcttgagcccaggagttcgaaaccagcctgggcaatgtagtgagaccctgtctctaattaaaaaatatatatatttaaaaaaaaattataatcaaagctcaatcacaggtccccaaagtgctaaagtgctaacactgcttcttcctctcacctcacgtggtgaggcagggaacaaaaacacaggtccacatccactcagattcggggtaggccacatctgcccctgggaagcaagctgtggtggcagcaagcccagctctggagcttgacctttgtgtcccattctgctactggttggctgtgtcaccacagacaggtggacctcactgaactcaattttgtcctccataaaatgtagccagtaaatatttcatagcatagtcattgggattaaatgaaataatgcttataaatatctagtgctgaaaagttgctaaattaaaattagactcttattacaaaatcaggatggctaaaaatgactcttatgcctctcaccatgtttcaaaactggctctctcttctcttgtttattcgtggagagtcagacttgagttcgaaagttcgttctgccacctattttctgcgtagcccttctgagcatcagtttccttctctgtagattggagctaatacccatctgaatgggttattggcaaggactgaataaaagggtgaatccaaagtaggggttggcaaactacggatggaaggccaaatccagtccaccacctaattttatgaagttttattgactcacagccacattcattcaattatgctttggctgtggctgttctggtgctacaaaggcagttgagaagttgtgacagagactgtgtggctcgcaaaacctaaaatatttattctggttctttatagaaaaagtatgctaacacccgatgtaaaccatctaattcagggcctgcttgtggtaggtgctgaatgaacacagttgctgtcgtcatcatcatcatcatcatttgttcatatcattaatgcagcaatcaggtgcccacaggttctagagtaaaggggatgaagaggaggccccaagaggagcagggctgagcccgcacaccctgcacacccagtgcagggccgtgcacagagtaggcctttggagtggggtgatctctgtccaaaagatccttggtctggtggactttctaatacaccagcagtgcttttgttatttattaagctgacaaataaaaattgtatatatttatggtgtacaacatgatgttttgatatatgtatacgttgtggaatggttaacaagctaattaggcattaaytcacatacttacctttttttgtggtgagaacccctaaggtctattctttagcaatttccaagtgtaccatatattgttattaactatagtcaccatgatgtacattagatctcttgaacttaattctcctgactaaaactttgtatcctttgaccaacttcttcccactgccccctcgccattgacccgagcccttggcaaccaccattctatgctgcttctctgagtttgacatttttagattccacatataagtgagatcatgcatgtttgtctttctgtgcctggcttatttcacttaacatgatgtccttcaggctcatccatgttgctgcaaatgacaggatttcctgcatttttaaggttgaataatattccattgtgtatgtggaccacattttctttatctgttcatctgtgatggacacttaggtggcttgcgtatcttggcgattgtggataatgctgcactgaacatgggagtgcagatatctcttttacatattgacttcctttcctttggatgtatacccagtattggattgctggatcatatggtagttggtagttctattttttgagatggagtctggctctgtcacccaggctagagtgcagtgatgtgatctcggctcactccagcctccgcctcctgggttcaagtgagtctcctgcctcagcctcctgagtagctggaactacaggcatgtactaccaagcctggctaatttttgtatttttrgtagagatggggttttgccatgtttcccaggctggtctcaagctcctggcctcaagtgatctrcccacctcagcctcccaaagtgttggggttacaggcgtgagccactgcgccctgtcctattttcagtttttttttgaggaacctccatactgttttccaagtaatatttaaacatttaaatttgccaggaaaatgtgtcagaagcctgttgtcagggctaccatgagtccatataatgcctttgtgtaaattagaaaatgtaccctttccttaagacaattaattgttataataaatatactgattttcttagaatgagatgctttactgccaggaagttttaataaatatacaaatctactctgtattcattctgaatgggaactccccacccccaggattgttcagtgtaccacccgcatggctgtacatggcagccctgcttatcaaagaatggtgaatccatgtaagtcctgatatctatgtatctgttgtcttagagcaaggcccactgttatgggcctccctatgcatagctatgactttgccctcatctgtgcttccttgggctccgtgggctagcaggccctggtgcctccttacaaccacctttggggccccataggcagagatggagttggtccagcatattggaatccctgccagtaagatcatctgcgccaacccctgtaagcaaattgcacagatcaaatatgctgccaagcatgggatccagctgctgagctttgacaatgagatggagctggcaaaggtggtaaagagccaccccagtgccaagtaagctgagaaccactcatggggaggctgggctgtggggagcctgggctgtggggagcctgggctgtggggaggctgggctgtggggaggctgggctgagggaaggctgggcttcagagtgaaggggggggtggggtgagggggtggagctggggcaggtcaccctgtcctggacccagccacagttgcaggaggttggggcaggtactcctggactgaacccaggatgctagggtctagctagaacaaaggcagaaataactggttaaagccctaggcagagtgagacccatgtgttatggaggccaaagtcacaggcttgagagagtcgagggagtggtcaggaaggctccacggaggaagtggcatttgaagcaggccttgaggaatgaatagaatttggagggggcataaatagtgaactgcgtaagcaaatgcattgaggttggaaacagcatgggacattcaagcgtaagcagaaacttagtgtggctgacgcatgctatgtgtagggggtgaaggagatcctggtcgggggcggggagccgatgcaaatggactttcgaaggggtcagggctggacgttttgctctggctgtgccttttacatgattactggacacccttggacttcccaggaggggccttggggtgaagggggtggccaggtgatgggccactccagtccatccaaagcagcttccatcgtattaatgggttctccttaaggctttgtttaaaaatggttcctctcatacacgacaagtttgaaagctctaactggtgtggagactgatttggagggactggagctgccccaggagagttggtgaggtctggaccagggcgcaggggctgcaggaatgggtcagggacatttagagaatggattggacaggacttgaaggttgattggctgtgtagggagagggaggggtcagggagcctgtggggttgggtggctctgagccatgtagctcacagcccttgattgagagatgtggctggggtggggcgacagggtttgtccagcagaggggcactgcgtgtctcatcaggatggttctgtgcattgctaccgatgactcccactccctgagctgcctgagcctaaagtttggagtgtcactgaaatcctgcagacacctgcttgaaaatgcgaagaagmaccatgtggaggtggtgggtgtgaggtgagcactgggaacccctgccatcccctcccacaccaggctccctgcctctttcccaggaattaattctatatgagaccttccccagggcytctgagtagggcctgtccctgggcctggaattctkccatttgagaatttcctctgtttgaaaaggaagtttagaagggtcccttccccagtcccagggtccccagaaggtcttgtcccaggaagttccatccagagacctggctttgagggagtcttaccagcctgtaggacaaaggttttgcagctacactcttgaggggcctcttttcttttctttctttctttttttttttttttttgagatagggtctcactctgtcacctaggctggagtgcagtggcatgatcatggttttctgcagccttgagctcccaggctcaagcaattctctctcccgcctcagcctcccaagtagctgtgaccacaggcgtgcattaccacacctgactaatttttatttgttgtagagatggggtctcactttattgctcaagctggtctcaaagtcttgggctcaagcaatccttttgccttggcctcccaaagtgctgggattacaggtgtgagccactgcacccagctgtgtgcctcttttcttacagggatatggaaggagtaataatgaactacctaatgaacaatgaactacctaatatagggcttcatttattctgtacttaggtgtgccaggtgctgtgctaagtgcttcatgcacattctctcagccttgtgtggtgtgggtcttgtccccgcattataggtggggaaactaaaacaaagctgagtaagctgccaaggccaccctgctgactgggaggcacagccagatctggttgacttgggggtcctggctctcatcccagaaggagggatgggaggagcaccaagtgccaggagcccttggatcaagcctcctgtccacttctcccttgccatatggcccttggcaacccattgaacatttcaggaccttggtcactgcatctgtaaaatgggcacagtgtctcatgtgcctgcccaatgtcattcttggctggggctcaggtggtggcacttggagccctgcatgtcagccgaggctcttcctctcttcccagttttcacattggcagtggctgtcctgaccctcaggcctatgctcagtccatcgcagacgcccggctcgtgtttgaaatgggcaccgagctgggtcacaagatgcacgttctggaccttggtggtggcttccctggcacagaaggggccaaagtgagatttgaagaggtaaccctggagctgggagtgtcrtgctgggctctatggcggggaggatagggagggattagatgatcggagggagaccaccgtgcgtgggtcctatgcactgcatgcagtgcttggtgcttacctgggtgatctcactgcttattaaccctgtgctacagctgagcaagccaaggctcacagaggttacattgcttcctgagcccaaagcagaacctggttctgcctgccatgcacttcagccaattggaggcataaccaggacacatttacataagtcgtaaggctctttaaggggcgggataggcctcttcaccctaaggtgggctgatgagatatcgggtggggaggcagggaaacgaaaaccaacctttggtctgctgcctgtccattctcttcctctattcccttttccttacccactgtgaggtgaagttaagaaaaatgtgtcctagcagttcccactccaaccactagaggtcgcctcttcttggaaggcgcctccttcgggaataccgacatgtaggaattgaccttacagaaatgatttgggatagtctcaaagaatttgcctcaaagatgactgttctagctttgttcctaacagaagtccagtggacttccctggtccatctaatactcaggatttgttaaattatggtacatccttttgatgaaaacacttccttaatgtggggaggtcgttcacagtctattaagtaaaacaggttccaaaaacatatacagagacctaccatggttataataaaaaatagcgtttgtataaaaaataattaaagacactactccaaaaagttaacaataattagattcatctagttgatagactttggagtgacttttatcttctttttccttttctgtattttctgaattttctgtaatcaagtatattacagttgacctttgaacaacgcagagcttaggagcaccgaccccctacacactacaaaatctgcatataacttttgattcccctaaaacttagctactatagcctactgttgacaagaagccttgctgataacataaacagccgattaacagatattttatgtgtgatatgtattatatactgtattcttacaataaagtaagctagaggaaataattttttttttgagacagagtctcactctatcacccaggcgtgagtgcagtggcacaatcttggctcactgcaacctccgtctcctgggttcaagagattctcgtgtctcagcctcccaagtagctaggattacaggtgcaagccaccatgctcagctattttttgtatttttagtagagacggggtttcaccatgttggccaggctggtctcgaattcctgacctcaagtgatctgcccacttcagcctcccaaagttctgggattacaggcatgagccaccatgcctggccagaaataaaatattattaagaaaattataaggaagggaaaatgtatttactattcattaagtggaagtggatcatcataaaggtctttgtcctcattgtcttcaagttgagaaagctgtggaggaggagcaggaagaggagggcttggtcttgctgtctcagggtggcagaggcagaagaaaatccatgcataagtggacccacacggttcaaacctgtgttgtttaagggtcaactgtatttaacaaactggttatttatgaaagaaagatccacatcagggcttctggaatctgagtaccaagtgtgatatgaagaggactccttcccattgtggggccatggaggagggtgatttacacaagcacgaggctctctacccagctctgtccccctcctaccttcttggccagctgtccacagttatcagctggggccttagcagctgccaaatccttcttccggaaatcaaagcagctttcaagaaatagacttggagctgtagcaagtcttcrgcataaagcccacatttcaaacacataattgtctccccattctcctcctaccagattgcttccgtgatcaactcagccttggacctgtacttcccagagggctgtggcgtggacatctttgctgagctggggcgctactacgtgacctcggccttcactgtggcagtcagcatcattgccaagaaggaggttctgctagaccagcctggcagggagggtaggtgccaggtgggcagtggagccctgttctcccctgaagctkcagatagtggttggctgagcaggatctggttttagacccagtggcagaggatgrgggaatctggagaatgaatgggttcttgctttagggaaactttcagtcaagtcgccccaccccaagacatttatttagcatcttttttcctaggcatgttcatattttgtgaagattgagagcaaaacaaccttagagagaatagatactctgttgaccccattttacagatgaggaaaccgagaaccaaagagaatacaagtgaactgcttaatagctagtaagagcctgcatttgaccccatgtctgtctcctctccaaaatacaggctcctactcaccctactgcttctcataatataatgaaaataattaatgacagcttacatttgtttgagtccactttacagatgacaacataggcagggggaggctgagtcattagcccaaggtcacatggctgataaggggcagtgtggggattcaagttcaggttaggctgactcagcgcttctgggcccacatcaccaacatcagtgctcttccctccccttccagataggtcagggatagcagcctgtgagtgacaggtgtcagggactctgatcttgaggcttgccctctgctctgggaccctcatgcaggggagcctcaggactgtgcgcttttccccagagagaattcatgtgaagggtggtgggctccaggtaraatgtcctgtgttcgtgtgtggcattcttctggcttcctttatagacctgggggattgtcccgtctgatccaatcaagagacctggcttctcattctggctcatccactgccctatcatgtgcctctgagcaagtggcttaaccttttggggtcttgagtttgggtgggctgctcttctgcctttgctggggcacctaggggctcagatgcaagcaggggagtgcatcctgggcaggttgcttggctgcaggggtgagtgttcctaacacggcagtgaacccatgtcattggaaggatggctgctgatggcttttgttgtaggcctcgcctcatggttgaggaatgggtagccattttgcttccttactgagcccactgttgtgtcagccccactaccaccccctcacattgctacttgtgctgcctctgaaccctcccctcctgcagaggaaaatggttccacctccaagaccatcgtgtaccaccttgatgagggcgtgtatgggatcttcaactcagtcctgtttgacaacatctgccctacccccatcctgcagaaggtgagcttaccccacgtgggcctgttttcagttgtgtgtgtgtatttcaataacatttgttgtgtttttatctaatttttaaaaagtcaaacatatttattgtcgataatagacaacaaggatgacgaaggttatcacccataatcccaccacactctttgascattacatattttaaaaaatgccttatacttttttcatgacattggaatcatattgttttgtaacctgctttttccatttatatggggtgtagctctttccatgccattaactgatctttgacaacatgcttttgtattttaaccaatctaactctagtggttggctatttggtttcctctttttgagcactgtgaatatatgttgaggtttcagctctgtggtaaattcctggaagtagaaacagttcatatacagtgggtttttctgtaataacaggggaacaggaatacataaaacattcctcctagcctgtggaacccagcccagggcctccagcaattttaatgggcatctttgagaggataaagaaaaccagacatcattttatcttcccctctccattgtgtcttcctatctctctctctctttttttttttgagatggagtcttactccgtcaaccaggctggagtgcagtggtgtgatctcggctcactgcaacctccacctcctgagttcaagtgattctcctgcctcagcctcccgagtaggtgggactataggcacccgccaccatgcctggctaatttttgtatttttagtagaggcggggtttcaaccatgttgtccaggctggtctctaacccttgacctcaaatcatccaccaactttggcctcccaaagtgctgggattacaggcacgagccaccatgcctggcctcttcccatctcttgacctttgtgcagcccctcttcctggaaagaaactttccttgcatgccttgaagtgcctaactagcactcattatgtttttccttcccttcccaacctatccagtttttcaaaagtcagtcagaggggtcttgaaaatcaactccactttgtggctcttcctgccccttatccctgtgctggcctagggaacccctctctccctccctccttcctccaggtacccaggcaccctagatgtgcttgatggagcctcactccatggttaaatgtggttacatctgctggtcagagtaggcctccccaaggtgctgaggaatgctgagctctctactctgacgcactagcattgcctgcattcttgtggtagcccacatcctactgcactgagaagggaccaggccagccagcttacagagcgggcagctgttgagtccccgttactctgcctctccagtactcgtcttcctgttgcatgctggctctcacccactccactcccttcattggctcctcagaagaggagatgatggtcccagcccactgccacgccccccaccgggatctttgctttggctgatctctagttggcattcctgacttgggcactgggatgtttgactctctttgtggtctgtgctgttcctcccctgaacgatgctgcggtttcttcctttaggctcttaactgcttttcaagtttggccacgtgagcgcctccagagtggggcccacagcctggcggtggaataagacattgcatagatgacaatacacataataagttaactcctgtggtgctgggagtgtgtgtcagagggattcagcctggctgrgggtatccgtaccttctttcccaaagaaggtccccttacaagtattagttttggcatctttctttgcatacctgctcttccttcccagggactttgtgtttagacctgggtataaaaagttgtatgaggccaggcgtggtggctcaagcctgtaatctcagcactttgggaggcagaggtggttggatacctgaagtcaggagttcgagaccagtctagccaacatggtgaaaccctgtctctactaaaaatccaaaaattagccgggcatgatggcacatgcctgtgatcgcagctacttgggaggctaaggcaggagagtaacctgagcctgggaggcggaggttgcagtgatccaagactgtgccattgcactccagcctgggcgacagagtaagactctgtctcaaaaaaaaaaaaaagaaagaaaagaaaaaaagttgtatgaaacataatccttggctcaagatatacttcttattgcaccatgcttggcccttttttgtgtgtttctttttggtttttatttttataaattcagcaaataattcagtactctcaaagcagtactctcaatactcaaagcaccgtgctgaggtctgcagaggaattgtctgtgctttggaagtacagtcctgttggatagaaacacgtgtgtgtgtgtgtgtgtgtgtgtgattagtatacaagctacaaccatgtatgagaaaagtacagaacaaatattattggagcttttaaaacatattttagtactgtacatgtttctaaaaaataaggaacttaaaaaatcacaattccattatcaaattaaaaaatgaataattccatagtatcccccatcatcggtgttgagctatccccaactgtctcataatggtttttatattaacttgctgaaatcaggaggcaaagaaggtctgcatggtgcatttggttgccatctctctctctctcttttttttttgagacagagtctcactctgttgcctaggctagagttcagtggtgtgatctcggctcactgcaacctctgcctcctaggttcaagcttctctcctgcctcagcctcccgagtagctgggattacaggtgtgtgccaccatgcctggctaatttttgtatttttagtagagatgaggttttgccatgctggccaggctggtctcaaactcctgacctcaagtgatccatctggctcggcctcccaaagtgctgggattacaggtgtgagccactgggcccggcaccatgtctctctcttaacccattggtttccccatactcttttcttctttttcttttttgtagagatgcaatctccctgtgttgtctaggcgggttgagaactcccagccccaagcgattgtccagcctcagcctcccaaagtgctgggattacaggcatgaaccactgtgcctggcccccaccctctttttaagtctgttttgtttgtttgttttctttggtaattttaaactgagttgtttttcctgtggagtttcctgcattcttgattttcctgattggtgaatttcctgaatttccctttggtgcttttgaacatgtttctctgcctggtatttttttttttttttttgaaattaggtagatttagaggtttgaatagcatctcaatcagctttggaataaaaatactccatgggagatcttgtctttgttttccttttagagtaataagcatccttattatttaacctacattgccttccatgcaaagtcgtcactatcttgactcatgcattatcattctctggctttctttttcagtataggtttatcacatctaaatctattcctcgagtgtatttataatttattatatttgtttttttgctttataaaaaggtattttgatgcatgtaacctgtttgggctttttctccctcatatcacagtctaagaaccactcaccctgctacatgtctctagagtccattcatttcattgccgtgtagcgctcttttggtgagtatgctgcagtttatttgtccattctcctctcaaggcatttggactgtctttgggtttttgctactgtgaatactgctgctgtgaattcttgtttccctctctctgatgagtgagcaaggagtggaatggctgggtatagggcatgtgaatgtttggcttcatgagaaaatgccaaacaattttctgaagtgttgtactgacaatcccaccagcagtgtgtaagagactcggtggctctgcattttctccagcatggagtattgccagactgaaaacattttcccagtggaatggatgtaaaatgatatctcattgtgtcttgatttgcatttccctcatcactagcaaagctggatgtctctttgtatatttactggccaaatgtgtttcccggaacttcttccagggactttgtaagttggtgttccccttcatgtctgaatttctccaccgagtggtctgtacccactgcccctgctcactcagctcccttagcccttccaacctctccagtcaggtacctgttccatgatgccatggaagatgctcttgaaagtcacttccacgctgctagctcttccatatggctcttctgtcccagcagctggtcctcctctgttttcatgctcacctctcctggcttctgtggcaacatcctgggccttggctactcttctgctgttctcaccttgtctccttggcacttctcctgctcaccctttaagtgctgactgtctcaggcctcagtccttgatcttctctgtctatatgcgcttcctaggtaaatgcttccagactgaggctcttagtatcttccatactatcatcactcccaaatttctatctctatcctggatcacacccctgagctccagacttgcacatccaactacccgcttgagattcctactgggatttcacagacatctcaagtttaacttgttcagaactgaactcttgatttccaaccccaaacttctctcactaaatagcactgccactagccaactgctgaagctaaaaaagttggcattattcttgatttttgctttccctctccttccacatgcagtccacctgcaattcttgagtgtagttccaaaatacattttggtttcagtgaattcttcctctgtcgccaccctaatgcaagccaccattgcctcctgcttgagctactgcagtagccattaactggttttccacccccatactactacctgcttaccacccattttccacgctgcagacagaatgatcttttaaaatcccaaagattatgcccctcctctgcttaacaccatctgtggcttcccattgctctcaraataaaacctagactccttaccacaacgagcaaggctcctgccatcttcccaggcacctctgccctcactcctgtccctgttttcagctccacttacctgctccagtcccattcctctcctttctgtttttgtaacacctaagttgtttctgctctcagggcctttgcattcgctcgcccagaatgctcttccactcacccctgagacagctgctgtattctctttcttatgtctcagctcagatgtcaccttgtcagggaggcctttcctgactgccctctctaaagtaggctcacctcccctagtcagataattttgataccctgcttattttcttcacaacccatcgtaatctgttaattatcttgtttttgtttacttgcctatagtctgtcttctccattagcaggtaggctctatgagggcagccacgttgtccagttagtttcctctgagttcccagcaccagacacagtgcctggcatatagtaggtgctcactaaatatctgttgaatgaattgtgaatggatgaatcaatcattcaataaactgtgagacccttgagggtctcacatctgttcatatctgtttccctagtacggaacttggcatacagtaggttcagtatatgttggaattaaatagatctttttttttttttttgagatggagtctcactctgtcacccaggctggagtgcagtgctacagtcttggctcactgcaacctctgcctcccgggttcaagtgattctgctgcctcagcttcccgagtagctgggattacaggcgcccgtcactatgcctggctaatttctgtatttttagtagagacggcatttcaccatgttggtcaggttggtcttgaactcctgacctcaagtgatctgcccgcctcggcctcccaaagtgctttgattacaggcatgagccactgtacccggccattgtttctttcatttctatgtctttgacaaggataaaccattttgtttttgtttattgttttatttattttgatgtcaatgtctttttatatcctctgttcacttaatttgggaggtcttgaagttttttcttgcacatagaaatgagcttgcatatgcatgtgtgcatgtatttaatatgatgtttgatacaaatattttttcactctattggtttattgttttagttttgtaattctttgttattctttcatagaagttttgacacactattttgttttaactaagtttgctgtaattaataggaaggaaatctgttactttcttttgtgctctgctgttatagattatctttattacatatatatatatatatgtcttatagaaatagaatgtttattagaaaaaatttaacacaaatagtaaaataaaatgattcactaatcccaccattcagagatgactattgttaaatgtactttgatttctactttttttgggtttaatggctattttattttgttttattttatttaacacaaggtcacattctgtcaccctggccagagtgcagtggcacagtcatgctcactgtagcctccacctccgaggctcaagccatccttcccactccagcttctgaatagctcggactacaggcacatgccactatgcctggctaatttttgtattttttgcagagatggggttttgccatgttgcccaggctggtcttgagctccttgttttgttcaagcaatcctcccaccttgagattacagacatgagccaccacgcctgacctgataattttttttaaaaggttgtctagtcttgctaagaataagcaagacgtttcgtttactaatgtcatgatttaaccagttttagctgctctgatattaaaaggtgtttttgttaatatacttctaaaatattggaaataatcagagctgggtggggagagagaactaagcccaaaatctctaatttacaatgctgtaacattttgaaagaccaatcttgtttttgatttctactttttaaaaaagtgtcatagtgcactttgtttttcactttaaagttttatatattgtgagcatatggttttctttaaatactgacgtgttaggtggacttttaaatatagaaacattttaaatgttcattgagtgctctaaaataatacatatttagtgtgtgtattagtttgttctcacactgccaaaaaggaatacccaagaatgggtaatttaaaaaggaaagaggtttaattgacacagttctgcatggatagggaggcctcaggaaacctacattcatggcagaaggggaagcaggcacatcttacatggctgcaggagggagaggtgtgaagggggaacttccaaacacttttaaaaccatcagctctcatgagaactccctcactatcataagaatagcatgggcgaaactgcccgccatgatccaatcacctcccaacaggcccctccctcaatatctggggattacaattcaagatgagatttgggtggggacacaaagccaaaccatatcagtgtgtaaagatgcaattcaacaaatgtgtatgagcacttcacaaatgcaagatacgatttggtatagggtggaatcaagaggaggcaagtatcatgggagttttataagaatcttggcaggcaaaattcaggacagttaccccagtccatgaagagagattctccttttattgccaagatggggctttcttacttgctgttccattttattctagtttgttatgctttcaaaagtgtgaatctgtctggaatgtattgcaatagcacttaccaagtgtgtccctagactaagaagacagaagactcaaataaataaaattataaatgaaagaggagacattacaggataccacagaaattcaaaggatcataagagaccactactmgcatgaataactatacaccaagaaattggataacctaggcaaaatggataaattcctagacaaatattacctacaaagactcaatcatgaagaaacagaaaatctgaatagaccaatagtgagttaggagattgaatcagtaatcaaaaacctcccaacaaagaaaagcccaggaccttatggctttactggtgaattctaccaaacatgtaaaaaagaattaataccaatccttctgaaatgcttccacaaaactgaagcagagggaacacttccaaactcattttacaaaaccacaattaccttaacaccaaagccaaatacaccataagaaaagaaaattacaggccatgttcacagatatgcaaaaatcctcaacaaaatactagcaatccaaattaaatagcacattaaaaggatcatacaccatgatccttttaaagtggaatttatccctgggatgcaaagaaattttaacatgtctgaatttataaatgtgatgtactataatattaccayaatgaaggataaaaatcatatgatcatctcagtagatggagaacaagcatttgacaaaattcagcatcctttcatgataaaaactttcaacaaattaggtatggaaggaatgtacctcaacatgataagggccatatatgacaagctcacagctaatgttatactcaacaaggatcctaaggtcaggagcaagactaagatgctcactctcaccacttctatttagtgtggtactagaagtcctagccagagcaattagagaagaggaagaaataaaagtcatccaaatgggaaagggagatgtaaaattgtctctgtttgcagatgacattatcttatatatagaaaactctaaggcttggcgtggtggctcatgcctgtaatcctagcactttgggaggccaaggctggtggatcacttaaggtcaggagttcaagaccaccctggccaatgtggtgaaaccctgtctactagagatacaaaattatccaggygtaaagatgtgtgcctgtaatcctagctacttaggaggctgaggcatgagaattgcttgaacctgggaggcagaggttgtagtgagccgagatcatgccactgcactctagcctgggcaacagagtgagactccatctcacacacacacacaaaggccggcgcagtggctcatgcctgtaaccccagcactttgggaggccgaggcaggcagatcacttaaggtcaggagttcgagaccagcctggacaatatggtgaarccctgtctctactaaaaatgcagaaattagctgggcacggtgatgggtgcttgtaatcccagctactcaggaggctgaggcacaagaatcatttgagcctgggaggtggaggctgcagtgaactgagatggcgccactgcactccagcctggcgacagagccagactccatctcaaaaacaaaacaaaacaaacaaacaaaaaaactytaaagacttcaccaaaaaactattagacttaataagttcagaaaattagaagatacaaagttaayatacaatgtttctatatgctaactatctgaaaaagaaatcaagaaaactatcccatttataattgcatcaaaaaattacttaggaaatttaaggaggtaagagatgtgtacgctgaaaactagaaaacattgatgaaggagataaaaaaggacataaataaatggaaagataccccatgtttgtgaattggaagaattaatactgttaaaatgtccatactacccaaagcgatccatagattcaatgcagtccctatcaaaattccaatgatcttttccccagaagtataaaaaaatcctaagatttgtataaaaccacaaaacatcctaaatagccaaagtatcttgggcaaaaagaagaaagctggaggcatcacattatctgatttcaaaatatatactagaaagctataaagtaagcaaaactgcatggtactggcataaaaacgaacatatagaccagtggaatagaatagagagcccagaaataaatccatgcatttacggtcaattgatcttcaacaaacgtrccaaggacacacaatgggaaaggacagtctcttccataaatggtgttaggaaaactagatatccacatatagaagaataaaattggatgctatctcacaccatatacaaaatggattaaagactttcagattgacttttttttttttttttttgagacagagtctcactctgttgcccaggctggagtgcagtggtgtgatcttggctcactgcagtctctgcctcctgggttcaagtgattctgctgcctcagcctcccgagtagctgggattacagacatgtgccatcatgccccgctactttttgtatttttagtagagatggggtttcaccatgttggccaagctggtcttgaacacctgaactcaagtgattcgcccacyttggcctcccagagtgctgggattacaggcatgaaccaccgtggcccagattgacttctttcacttagtaatatgcacttaagtttccttcattcctttcatggcttgatagctcatttctttttagcactgaataatattccattatctgggtatacagcagtttatccattcacctactgaaggacatcttggttgcttccaagttttggcaattatgaataaagctattataaacatctatgtgtaagtttttgtgtgacaagcaatttttaactcctttgggtaaatactaaggagtacaattgctggatcatatggtaagaatatgtttagttttgtagaaaattgccaaacggtatttcaaagcggctgtaccattttgcattcccaccagcaatgaatgggagttcttgttgctccacatccacaccagcatttggtgttaccagtgttctgaattttggccatttgagtaagtgttcagtggtatttgttgttttaatttatatttccctgatgacatatgtttatttgccatctgtatatattctttggcgaagtatctgttaaagtcctttgaccattttaaacagagttttacttgtttgttttctcatttttgagttttaagagttcttcatatattttggataacagtcctttatcagatgtgtcttttgcaactattttctcccagtctgtggcttgtcttctcttaacattttctttttctttttttttttttttaagttagagtcttgctctgtcacccaggctggatggagtgcagtggtgagatcttggctcactgcaaccttcgcctcccaggctcaagcgattctcctgccgcagcctcttgaatggctgggattacaggtgtgcactaccaagcctggctagtttttgtatttttagtagagacggggtttcaccatgttgtccaggctggtctcgaactcctggcytcaagtgatctgcctgcctcgacctcccaaagtgctgggattacaggtgtgagtcaccacgcctggtgaatattgtcttttgcagtgcagaaatttttaattttaataaagtccagtttatcaattatttcttttatggattgtgccttwggtgttgtgtgttctattcttttttttttctgtagtgcttattaccttctaacatactatataatttacttgtttgcctcccccctgctaaactgtaaaccccaagaggacaaggacctttgtgtattttgtttattagtgtgtcccaagcatacaaaacagtgattatccaaatatgtattaaatggcaacctaattctgaaactggatttttgttttggagtgtatgctgaatcatggtagcattgaccttcagttttgatatctgtgtgggttcctagggcctagtcaagatggagaatccaataggatgcccttacrtagagctgagaacccaaaagaagtacatccttagtgtaagagtcaactagagaaaaaagcccattctacagagaatggcagcaagaaaacttcactgttttgatcttggtagtgattggaagagagaaaaaaattgagattttgtaaccacaagccagccttcttttgggcttatggcccaaattcacattaactatggtytgaaaaaccttaagcctcaaaataatttcatctagcagaagcaaacaaattctctctggaggaggaatcttcagtttaggcttctcactgataaggtttcaaagtacatgagctcacagtcaaaaatcacaacatacaaagaaacaagtcatcrtgaggaagaaccgcaaaagcaataggtagcagatcagacctgcgtttacttcatatattggaattatcaggtgctaacattcttttacaatgtttgaagaaataagaaattgaaaatatgaccaaagaataagtgaatataaaaatatgttgtagcagattttaaaaaggattaaatagaactagaaatgaaaaatatgaaaattgaaattatggccagggtaagcagcatattagagacaacagaagagagaatgagagaatgggaagatagagttgaagaaagtatccaaatgtagcacagagacaaaaagatataaaataggaaaggctaaggaaatggtgcatagagtcagaaggcataatgtccaatcatagtttcaggaagagactgtatcaggatacaaatgtcacactagtaatttgaacagggaaattttaacataaagaatggttaactgtaaaggtggttcattacaattactaaaaggggtaaaatcagctaccacccctggtcctgagrgagagtgaagaaggcaggaacttagaaacacagaggaggagggctcctccctccaaggctgatattgaaacctttgaggagaggctgcagtgtcacagaaacagcagtccaccagtggcaaacttgtcagagggtgactactgcaacaatccatgcagcacagaagcagcctgctgctgagtgggggagaatcttgctggaaggtgcaggccagggctgaactgtgaaggccactaaggcgaatgctaccatgtacttgctgggtaaccttaggcaagttacttaatctctctgagtcttacttctctagcttggaaaatgagggggctgaactttaattactaatgttgcttctttttttgaagtgaggccattccagtgtatcttcacaaagttagagttggttccttattgaaatggtctgtcttcattgtggggttttgttttgatttttctgtagttttgatcaagaatagatggtacagctattgaatgccacgttgagatgttaaaatgtaaatgtatagagtaaccactacaagaatagaaataagataatataacttctaacacagaaagtaattaaaatagtttagttttgatcccagcataagaaatagaccagctgaggcaaactggggggaatattgaaacacatatataattgataagagattagtagacaaaatatatgaataatttttttttttttttcctgagacggagtctttttctgtcgcccaggctggagtgcagtggctcggctcactgcaacctctgcctcccaggtccaagcaattctcccacctcagcctcccaggtagctgggtttacaggcacacgccaccgtgcctggctaatttttgtattttttttagtagaggtggggtttcaccatgttggccaggctggtcttgaactcctgaccttgtgatccacccacctcggcctcccaaagtgctgggattacaggcgtgaaccacggcrcccggcctgaagaattcttaagtaaggaatagagacaaacaagaatctcaagaaaataaggaaaaaagcaacccaatagaaatacaggcaagagactttaccgggcaattcacagaagataaactgaaaaggtgctcagtggtaatcaaggaaatgcaaataaaagtgaaaacgagataccatttcataacaactagattagaaaaacattaaaagcatgataatgccaactgttggtgaggatatggtgtagttgggtccttaggcactgctaggtggcagtggtgtatcactactttgggaaacaagtaggcattattcagataaatttgcacatatgtatgtcctacattacagcaagttcctaggcctatattgtaaagaaactcttggcatgtgtgttcgaggagatatatcagaacatatatatctttataatataaaacattggaaaygaccttaatgtttattggcagggtagcagaaacataaattatggtgtattctgtacagtgaattctatacagtgtattgtgaacttgtagagattacatactctataatttatataaatctcaaaagtgtgcaaaactaaacaatacattgtttagggttaggtacactcatggaaaacaaagtaagaaaatgatgaacatgaaagtgaggatggtggttacctctaaagaggttaggaaagaggagatgtcattggagtgggcacatagggagtttcaaagatactggaaattttatctttcttcagttgggtggtaagtacacagatattcattttattgtcattcgttatatcttagacatgatacaaatattcttttgtataaattatttaacaaaaactgagtttgtcatttgctttattattattctttgataggctcacatttattcttttatcacattatttctaatgtttagaaaaacatcctggggattttaattagtaatagtttatttaatctagttattaaattagggagaattctcttttttgctttactaagtttttctagctaggacagtgtaaacttcatatcttttatttcttccatgaaggttttatttatttattttttttgagacggcgtctcgctctgttgcccaggctggagtgcagtggtgcaatatcagctcactgcaacctccacctcccaggctcaagcgattctcttgggaggcctcagcctcccaaatacctgggactacaggcgcccgccaccatgcctggagagatggggtagagatggggtttcaccgtgttarccaggatggtctcgacctcctgacctcatgatctgcctacctctgcctcccaaagtgttgggattccaggcgtgagccaccgcgcccagctggttttattatttttttattgttttatttgaataagtattactgtggcccaagtacatccaagaatgtaatagcttaatgctttcactactattgtgagtgaaaacttttccctgtgtttttgagctgagatgctggcttgcattctaaaattcattgatttcctctagtaaccacacccacccccttaagattttccaggtgggcaaatacgttatctgcagtgtaatattttatttcttcatcttctatgtattatgcttttttgtttctttttttctgatagctattgctagcatttctcatcatatataaaatgggaatgatgacagaaagcttcagacttggaatcagaagacatgggtttgagacctggctctgccatagaccagctgagtaaccttaggcaaagcaagctacttaatctctctgagccttrtttctctagtttctccatttggaaaatgacagggctgaacttcagtgtatctcaatgaagtcagagttggatcattatttaaaatagtctctcttcattgtggggttttgttttgtctgtagttttaataaagaatagatgctacgggctacttcatggtatgttgacatgtattgggaaaattaaacttgaactgtagatctatattttccatgttatgaagccagtgattgacttctctcctgttgtctgcacctttcattttagagataatatgactgtgaatttggttagctaagatttcatgtcaggtttttgcctatatattcacaagtgagattttggccatagggtttttttttctttttatctcatttttgtcttttaaaatatttttgtacgaattattgatttattcttttctttttttttttgagatggagtcctgctctgtcacccaggctggagtgsagtggtgcgatctcagctcactgaaacctccgtccgggttcaaatgattcgcctgtgtcagcctcctgagtagctgagattacaggcgcctgccaccatgcctggctaatttttttgtatttttagtagagacagggctttaccatgttggccagactggatgatttttttttcttttcttttttttttttttttgagatggagtcccgctctgtcgcccaggctggagtgcagtggcgcaatctcggctcactgcaagctccaccttccgggttcacgccattctcctgcctcagcctcccaagtagctgggactacaggcgcccgccaccatgcccggctaattttttgtatttttagtagagacggggtttcaccgtgttagccaggatggtctcgatttcctgacctcgtgatccacccacctcagcctcccaaagtgctgagattacaggcatgagccaccgcgacccgcctttttttttttttttttttttgagatggagttttgctcttgtcacccaggctggagtgcaatggctggatcttggctcactgcaacctctgcctcctaggttcaagcgattcttctgcctcagcctcctgagtagctgggattacacgcccagctaatttttgtatttttagtagcgacagggttttgccatgttggccaggctggcctcraactcctgacctcaagtgatgcgcccgtgtccgcctcctaaagtgctgggattacaggcgtgagccaccgcgcccagcctattgatttattctttaaaagttgaagaattatttagggattccatcaaggccgtgcacctttttcaatgtttgaccttgttttttctgtggctctgtcagacatatgtgcctttgaagaaggcagctaggtgcagccaggaggctccttgtctgggactgcccagagttctactaactccccctagagccttgggcaggtcaccttccctctctgagttttctcatctgtaaaatgggaatgcaatcatgccacctgcctcccagataaggtatgaagtggtggtggtatgctttgtaaatgaggaaccccctgccctctctcacagaggggcctagtggctggcagactgggcatcttggatttttgcagatgcttgtccatttccactcagacttgtaaaaatagctgagatttacaagcttgttgccacagcttttagaatatttatttcacagattccttaaaaaaaaaaaaataggctgggtgcagtggctcacacctgcaatctcagtactttggaaggccgaggtggcggatcacctgaggtcaggagtttgagaccagcctggccaacatggcaaaatcctgtatctactaaaactacaaaaattagccaggtgtggtggccggcacctgtaatctcagctactcgggaggctgagacaggagaatcgcttgaacccaggaggcagaggttgcagtgggctgagatcacaccactacactccagcctcgatgacagagtgagactctgtctcaaaaaaaagttaaatagatacataaatagtaaaagcgtagctttgcattatgtcatgtgaagatttaaaatcttttttcacctaattttttaaaatttacaccactaataacaagtgagggaatgctaacttcttataatccaagggtgccttttctctttaccatggaagaatctttaaaatttattttcccaaagatccttgtagattcatttatagagcatcccctccactcatctttaaacattagcttaatgtttttcaatgagtggggctaagggaaataattcagaccacttgaggttaattttattcatcaacaaaaagtttataaacaagaatgttcagttatatgaacaaggatatacagtattcctttgtctccccttcttagaatgggagcttcatgaccacaggaattttattttgtgtgtgtgtttactgctgcatctccagctcctagatcacagcctggcaattagtaggtgctcaataagtacttgttgaatgaatgaattcctgaagattggatagctatcattcttaacttacataatgtacatatttttctttattaatgggactaatagcttattaactttttatcaaatatatgagcactatttctgcttatggaaactgcgacttttctttctcaattttactcattcctgctctggctaaggtattgaaacgcctttccttttttctctgctggtcttctctgttgcttccatctatgccctttggatggcttccattcatatcctttttctcccctttgtcattctttctctttctcatcactcatatattccccattctttaattcatttatttaaaaatattatttgaataagcacctaatggatgccagcctgctaggcattgaggagatggggatgacaagacctacacatcccctgggctcatggaatttatagtcttcagggaagacaggcctgagcagatatttcacaaatatttatgaattatggtaaatactacgaaagcaaagcttgagggagcatggagctttaggaaaggcttccctgaagccattttagctgagatctaaaggagaaataggaatttgcaaatttggggcctcagggaatagcatgggggaaagtaggaggtatgggaagggaagtagggtttacctggggagcccagagcaactggagtaactggagcacagcaagtgcagtgatgggagaagaggcctctcagagggcacagtcatcatcatccacatttcagtggtgactctaggatctgcctggcaagatccctgcctacactgtggcaaatggcactgataacttggttgtccagagtctgttacaaatttctggatttggaaatcatttaagaaaaaatcttaaattttatgtcattggtagttgtgtctttgggcaagtcatttaagctgtcagagcctccatttttctgaaatgggagtaattgtgtctactctgtggggtcctctgtgacctctgccaggtccccctgtgattgttgttggaagtccatctttctcattagactgagggcctgagggagggtgagtctagcctggtatactgctggctcctgttgtggggcctggcatggagtgaggacatctgggagggcttcatagacgagggagccccagggctgggctcagaagacaggctagatttgagggtcggggaagggctgtagaggtgtggacatatcgacgtctggaaagaggccagtgaagaccaaagtgcagaggtggtaacaacagcaatcacaacaataagttacaattgtgctgactttctgtgcaccctcgccgtgtgccgccactgttctacatgctctccatacactaactcatttatccttgcagtarccttacgaggtaggtactgttgttatccccattttacaaatgagcaaactgagacatggagagattaagcattttgcccaaggtcacacagctaacaactgctggaacctggatttaaggccaggcattcgtgacttcagagtgtaagaggcaacgaatgcagagaagtgggaagggccttaaatgctaagctaggaggcccatctagactttatcctgttggctatgggagccatagaaggcttttgagggagggagtggcaaggctgttgtatgcccaggagagctggcatggccatcccttcttcctacagaaaccatccacggagcagcccctgtacagcagcagcctgtggggcccggcggttgatggctgtgattgcgtggctgagggcctgtggctgccgcaactacacgtaggggactggctggtctttgacaacatgggygcctacactgtgggcatgggttcccccttttgggggacccaggcctgccacatcacctatgccatgtcccgggtggcctggtaagagggccctgctggaaaatgggggtatggggaggaactgggcagaaacgagggaaacttgagatttgagattctgcttctgtgtaatccaacttgacaagtagctgttggctgctggtcccacgtgagggatgtgcttggcacctggctgtggccataagtgaggctgggctttcctagaggagctcacagccctgagggaggcacagagaagcagacaggcccttgtgataatactgtgcctggtggaagtgcagagccctccctgaggcccaggcctccctgaggaagtgggagtcaactacaggagtgggtggtaggacttcccagaagaaaggaacggagagcaagtgtggtgcattcaaggctygcatggagagtggctgtgactgcagagggaggcagggctagatctgggaagggcttgaaggccgagtgacacgctttgacagcagtgggaggcatggaccagtttgaagcaggggcataacacagtctgatttgcactttggaaagaccaccctagttcctgtatagactgaggacaagggcagatgcagaaagagatgaccagttaggtggctgctgtgtgacacaggagagacttggtctgcctgcttgctgagccttggtctttccatctagaaaataagcgtaacagtagccctgcctgccccaccaggctagtgctgggatccagtgaggcaagaggcatgcaagatgggggagtcacatccagtgaaccctgacatcaggccttacgttaggtgtcgtatgactatttcacccacacaacactctgtgggggtcagcgttatcacagagaggtcattcttctgaggtcacgcagctagtcagtggtgaagggtccctcttttggggtagggagagggccacagaaagcaggagcagtttgcccaggcacattcaattcctctgctgtgtccagtctcaggactgtcaccaaagctgagacctgaaggctaaggaggaattagatgagagttgatgatacaggcagagagacaaggatggatccaggctggggagaggacatgtgtaagagcccaaaaggtggccatagtggatggctcaggtgtgtgggccagtgtgtccaggagtgggtggaagaggcgggtagagccagatcttgcagggcctgagagcagagggaaatggctggcagctcaagggcagggatttgttttttggaaagatgaatctgggtcctggctgagaactgtctggagagggcacgagcagatcagggagactgaaatggtgttacccatggggatggagaccatggggcacatgaggatgttcagaagctgggctcagcagggctcractgggtgtgggaacaagattgccaactgtttacaactctgatagtggagccattgatcaacatgggtatgtaggaggagaagcagtttgtgggattgtttgagagaatgggatatgattttatttgaagtcccaagcctggggtatgatgaatgtgggctttcgagtgagagttgggttcagtcctagttctactacctactagggatgtgatcttaggtaggtcacttctctctctggggaactgattgattacatcatcaatgcaacggggatggtaatgcctccctcatggggtttttgggaagatacaaatagataatataagtgcctggcatgatgtctggcatgtagtaaatgctcgatacatgtggatttctttcccttgttgaggggtggggaccacacgggagtaggaagcagttggggaggggtcagcagcctgtccctgcccctgccctcagctgagctcgggctcacgtgagagccctctgcccaatggggctgcgtctccaggtacagggccctgccagtcccatgctggctacttgcagcacccctctctcacccctagggaagcgctgcgaaggcagctgatggctgcagaacaggaggatgacgtggagggtgtgtgcaagcctctgtcctgcggctgggagatcacagacaccctgtgcgtgggccctgtyttcaccccagcgagcatcatgtgagtgggcctcgttccccccggagaatcccagcggggcctcagagatgcatytgggagaggtggggaagatggcaggcaagggtacccttggccaggactytggtgcccaccctgccacccccgcgctccacctgcagtgtttctgccctgtaaataggaccagtcttacactcgctgtagttcaagtatgcaacataaatcctgttccttccagctgtgtctgcctcctctgcagtgcaaggggcctggtcagccaggtgtgggggtgttcttggggtctcctttggtctccttcccacctttgtaaatataatgcaaataaataaatatttaggtttttaaaaactgcagcggaatctggcagtttgattcacaaagcagcctgggctaggcctggggcaggatttccccatcactcactgatgagcccacaccctctgctttagtcctgagccctggctgcagcgtgtgcctcccccactagtactcaccttatctgactcatctctctcctcctcatgggcctccaggcctggtgccataaggaaggggctgctgtcagggactgagatgggcagttacgtagctcataactggtgaatggcctttgggtcagcccaacacccagcttaaggcctggcccagagtaggggcaatggagtatttaacacagctgtggaaattcatactgaagatacagagccaagaaatgggtgtgtgggaggttttgagtggaccctgcacccttgctctccctgcaggttggcaaggcagtcagagtaaagcagacacctggtggtcgcttttgcttctttgggcagtgcctgttagaacagggctggccacggagtattgctgtgtccagtgccgacagccctggcatcccctgagactggcagtgcttatcaggacaaaggctccttcacactgccgggttcccaaattatgccccggggtgtgtgagctgttgagcaaaggagttcagattttagagtccccctcagtggctgcaggggactctaaatatttttctgctgcaattaaaagatttgagatgtaattcatatgcaatcatcaaattcacccttttaaatgcagaagcctgggtgcagtggctcacacctgtaatcccagcactttgggaggctgaggcaggtgatcacctgaggtcaggagttcgagaccagcctggccaacatggcaaaaccccgtctctactaaaaatacaaaaattagccaggtgtggtggtatgtgcctgtaattccagctactcaggaggctgaggcaggagaatcacttgaacagggaggtggaggtcgcagtgagccgaggttgcagtgagccgagattgcaccactgcactccagcctgggcgactgagcgagaccctgcctcaaataaagaaataaataaataaagtggagaagttagtggtttctggtgtattcagagttgtgtaaccatcaccctagaaagaaatcccatacccattagcagtcactctccatttttcccattccccagtccctgatgacacaaatctaccttccatctctatggatttgcttattctggacattgtattgtgatggattttctatcttcacttgagcttctctctaggtaagcctgaccatcctgcttcagtatctcagccagtcctggtgggaactgtacgtggctttgaggtcatctcatgaggcaatgtggcatgggtttggagtgaacgaggtgctttctcaaagccaggggtgtctcccttttccaggtgggatctagttttcggtatcttgacaataaataggctgaaagcttgggacatcaaaagactcagggcaatcagaaagggttactctactaccccgtgatccatcaaagccacgatttacaggtattaccatgccagtaattgtctatcagactctgagacttcttccatctcagatctccaagcactcatacttcttttgcggagagggacataggttttctgctggaaccaggcatctgctgtgaaaagcgcaggaatcctgggaagatctcatggctggctacagtgagacccaggtgtagctgattccctcttctgagcaagtccactgagggggcattctgtggcttttgaaatgacagtggctgtcatggagtttggatggatttctcactggagcctttctagtgtttcatgttccatttgcagcaaggatgtgaaatttacttttccaagaaagatacacgcagaacttgatgtggcttacttgaggataatagttaatagtcattttttcccagttatttgtttttgtttcttatttcaatctttttctaaagagaagaaaaaagcctgaaatgtggagaatggtaaggggcttcaggcttgtgcaggcgaatctaagcaggggtctcctggacccctggctgcatgggcactgcctcctccaagctccctgctgagcgacccactggcagtggctcctcatgcctcctggctgccttggaagtcagatgttcctgttggcctatcacagacccatccttccctggggcatcacctgaggaacatcctcttcccaatgcctccctacaacccacctgtgcctcctgaagcccctcctgcgcgcacactcactctctctcattctctccttcaaggagttaacagatctgagcttccatcttctcatactcaggactggccccttcttcccctttcccctccacagtccatcctccactcagcagccagatgccgtacctcctgggattccgtttcaccaagaatgaaatttaaagtccttggccagctggctctctgactcccacacttccctctcacgcactgggtcctggccacactggcctcccctctgttcttcaaacactccactgctgggcatgcatttactgtcccctctctagaatgatcttcctgggttatctgtgggcctcactcacttcattcaggttctgtgcaaatgttttctttaggtgaagccttctggatcaccctttagaaaatagcatgtcctagtctctctcttttctcttaactagttttctttttcttcatagtacctaccaccactcaacatactctataacataactccataatgtgttccataacacaagggcaactgtcagcccttctagaatgtgagctctaggctcttggaataaacctgatttattttttcactgctgtgtccttattacctagaacggagtaggtgttcaaaaagtatatgctggatgggcaaatgaataaacatgtctgaatctgtctgaataaacatgctcttaacctgtctgaatctgtttactcatttgtacaatgtggctgataactttatttccctcagagggttattgtgaagattaaataagaaaatgggtataaggccagctgtggtggctcatgcctgtaatcctagcacttcgggaggccaaggctggtggatcacgaggtcaggagtttgagaccaccctggccaacatggtgaaactccatctctactaaagatacaaaaaattggcaaggagcggtggcttacgcctataattctagtactttgggaggccaaggcaggcggatcacgaggtcaggagtttgagaccagcctggccaaaacagtgaaaccccgtctctactaaaaatacaaaaaattagctgggtgtggtggcggcacctgtaatcctggctacttgggaggctgaggcaggagaatcacttgaactggaaggtggaggttgtagtgagctgagatcacaccactacactccagcccggatgacagtgtgagactccatctcaaaaaaaaaagatacaaaaaattagccaggcatggtggcgtgcacctctaatcccagctacttgtgaggctgagacaggagaatcacttgaacctgggaggcggaggttgcattgagccgagatcctgccattgcactccagcctaggcgacagggcaagactccatctcaaaaaaataaacaataaaaaataaaaaaagaaaatgggtataaagtacttagtccaggacttagcactcctctgagttctcagggagctcacagtgcagcatggtcacagaggaccttgaattacaaagccaggagtttgaacttaattctgtaggcagtagggagcccgctatgcttctggagcagaagaagcacgtcaggatctttgggaagattaattgaaagtgtattcaaaataaaaaaaagaaaaaaaagtatactcaaaaggggtggagggaggagaccttcagggctggtagtggcatgtacttccttcacctctgcccacagtctgaaaggcagacccagtcaggaaacttttttttttattatactttaagttctagggtacatgtgcacaacgtgcaggtttgttacatatgtatacatgtgccatgttggtgtgctgcacccattaactcatcatttacattaggtatatcttctaatgctatccctcccccgtcccccaaccccacgacaggcctcggtgtgtggtgttccccaacctgtgtccaagtgctctcattgttcaattcccacctatgagtgagaacatgcagtatttggttttttgttcttgtgatagtttgctcagaatgatggtttccagtttcatccatgtccctacaaaggacaggaactcatccttttttatggctgcatagtattccatggtgtatatgtgccacattttcttaatccagtctatcattgatggacatttgggttggttccaagtctttgctattgtgaacagtgccacaataaacatacgtgtgcatgcatctttatagcagcatgatttataatcctttgggtatatacccagtaatgggatccaaccaggaaactttgaggaggtcagagagacgcaagttgtcaactctgttcaccccagctcagagggagatggtggctctctgggtgggagtcatctctcacctaggaaacccacctgcccaagccatctcattccagctgtaaagggaacaaaggggaggcaagaggacaggggttccactcatccctttgctccattttaaaccctcttcctggcacctttaggtaaacagctaagcctgtgtaaattcaaccagtaaaatgatctgattgtcagtcctctgctgaaagcccttcagttgatttccgctgcgatgccaaaaaaagctaaattgcctgagacccctgcccacctctcccacctcatctcatgccactcttttctcacatttcagtttctcacatttactgacttctttcttgcctccaagtcttcgcctttgctgttcccttagctactccagcattggctcattctcatcttaaaggcctcggcttgaatgttgccatctcaagaaggccttttccaaacatcctgttcaaagtagcccccaccaacttatgtggtcatattttacagggatgaggctctaaagaccatatttaaggcaagaatcatatggtcaaaattatcattgaaaatcccttagaaagctatcatattggaatcttgttcatcacacgccctttcctttcctttcctttcctttcctgtaacatgccagacacacttacaaccccaaatctctgcatagatctctctccctcatcccttcaggtctttgctcaaatgtaatgttctcagtgagaacttcctgactacccacttcaggctgggagtgacggctcattcttgtaatcccagcactttgggaggctgaggcaggaggatcacttgagcccaggaatttgaggccagcctgggcaacatagtgagatgccatctctaaatcaaacaaacaaaaaaactgtaacatttccattcctgccccagcattctataatccccttcagagccttactttttcctccatagatcactgtctaacatattatacatttcacttagaattaagttctgagggcaaagatttgtttattttgttcactgctgggtccacagtgcctagaatactgtccttcatgtagatgttcaagaaattactgaatgaaggaatgaatctttcaggcctcagcttgggtgtctctctcctttctcttactttctattccttcattaggggttccatctccgggctttcatgcatcctgtatttgtccctattaaagaactactgatcacaatgtactgtagttttcctctctaaatacttgtcttcctgcgtatctaatcctattgattccataaagacagggagtgtttctcctactttctagtgtgatctggaacctaagactgtgcttaccacagagtagacacttagtgtcttttgaataaactagtttgggtggtggtggtgc

SEQ ID NO: 95899 - DNA, 24643 bp, Homo sapiens
  misc_feature (1)...(24643): n = A,T,C or G
actctgcagtaacccaggcagaagagtgaggtgagaactgctgtgccctttatgatctagcctcagaaatcacacgctgtcacttcctcagcactttagtggacatgggtccgcccagttcatggagcaggggtctgaacaggggaacataggaggaggcccagatcgcggctgctgtgggtgagttgcacagcctctctcaagctgcaaaataagaacagcagcgccttcctcaaggcgtggttatgaggactaaaagaaataatggatgcagataactagatctagataactagatgcagtggctgccagaggtgaacactggcggcttggattgacactgtctttggtggtaccccctcaggctgccaggagatagcagaggaattccgtgcccaggaaatcgacgggcaagccctgctgctgctcaaggaggaccacctgatgagcgyyatgaacatcaagctggggcccgccctgaagatctaygcccgcatcagcatgctcaaggactcctagggctggtggcagccaggattctggcccagggcgcctcctcccgactgagcagagccagacagacattcctgaggggcccagaaatggggccggttggagggcaggggctctccctaggggcatagctggtgaggaggtctgggcacctcctccatggctctcaggggcctttcatttctgtgggaggggcagagaggtaggtggcacagaagatggggctttatgcttgtaaatattgatagcactggcttcctccaaagtcccaatactctagccccgctctcttcccctctttctgtcccccattttccagggggtatatggtcagggctccccaacctgagttgggttacttcaagggcagccagcaggcctggatggaggcctagaaagcccttgccttccttcctcccacttctttctccaggcctggttaactcttccgttgtcagcttctcccccttcagcctgtttctgcagcagccagggttctccccmctacaccctctgcaggtggagagagagaagctgggcccagccgggccgtgcctgctggcacagacgccttaacgctgtgtgtatgactgtgtgactgtgtgggagcctggactgacagataggccaagggctactctctggcatctccaggtgttttgtagcaaacagccacttagtgctttgtcctggactccactcagcctcaggatggggaatagccaagaatggcagcctcagcgcagaggcaaggtcagaaagagacggcgcttcagagtttcctttccagacacccctccctgcactgtgaagttcccctgaccgccctcctggttcacaaagagcattaagaaagctgcggtggtctgagcaacatagcccagagggctgagcctcctggcctgcctgcccgcccaccctgggagtcccagtggtgaggctcagagaacttctaaggggaaagaacagctggagtttctgttgatgtgaagaaggcagctcttggcctcccactcccacacttctttgcctataaatcttcctagcagcaatttgagctacctgaggaggaggcagggcagaaagggcgagggcctgcctctgacctgccgtgtcctttgcaggaaggaggtaggcacctttctgagcttattctattccccacccacacccccaggcagggttggaaatgaaggacttttttaacctttgttttgttttttaaaaataaatctgtaaaatctgtctctttggtgcctttctcccctaggaatgcctgtctctgggcccaaatggctacttttcacccatacagacaggtgggtccctgggctggggaagggaccttaagtggatggcatatcctccacacttttctggagctgggtcatttgagggtgccctcagctgcagttcacacggtagataccagctttcttcacacggtgtcccttggagtgagagggtccagaagccctttctgctctgcgcccccctacccgccattcccacttgggagatgatgactgttgggctagcagcctctggacacctggggcagaacccagactctcccatcttccagcacacacctctcgatagagctgcacagcatccagaatagccttgggatggctttggttcactgagcacttttgcatgctcaaatagaaaatgattagggcagagatgaggcatctaagccttgaataaagaaggagaaagggcattccagaccgaggcataagtgcaaaggcacaagcatgaacgtggaagtgcaaatgagaggcaggtgagctggctggattagacgtgtgtgctgctaaccgtgacctgtgttgaccacatgcctctgaaccaggcactgtgctagaaatgagactggggtgaagcacagaataaccatgtgccctcttgcgtggagtgaaatctaccccacatctatggggggaggggaaaaagaggcagcttggccttactgctcctcccccttcatcaggtttttccctaagggaccatttctacctgttaaaaatttaggttatggctgctcacatctgtaaacccagcactttggggaggccgatgtgggaggattgcttgaggccaggagtttgagaccaacctgggcaacatagagagaccccatatctacaaaaaaataccaaaaaatggcaaggtggtgcatacctgtaatcccagctattctggaggctgaggtcgatcacttgagcccaagagttcaaggctgcagtgagctatgattgcaccactgcacccccaacccaggtgacagacaaaaaccctatttttttttaaaaaaaaagcaggggtgggggtggtttgagggtcaggccacaacctactgaatcacagtctctaaaggacaattacttacttgaaagtaactttcaagaaccaacactcacatcttaataactcctctttggaaagcctattaaaatggaactgtcttggaggagaaacacactgattagttgatccccagggggtagaactagggactggaaagcctgtcccaggaggcagggaatggctggcaggaccctgagctgacgggaggaggaggatgctgagattggggagtgagccctggggagcccccaggcaagaacgaacgccccatgtgctgccgcctctcctgctgctggagtgcaggccacgtgcgcaggtgcaccactggcctataggactctgggcagttcttttcactttctggaccttaattttccctttatggaagaaaatgaaaaccaggccccacctgagtttgttgtgtgtagcaaagagggagggaaccaaacctactcctaaaagaagatgtggtgaatttgattcacaccaataagtatccatcttctttagatgaaaagctccaacctgctgcaagtttgcagggtgcacctgcaataggcatttgctattcctgttgtttacacttcacactgaatttcacagacctatttccatcatgatccacaatttaaagaaatatttcccaaacttgtatacacatttcaatatctatcaactgaaacaaacatttcatgaaacaaaacctacccttacgtacaatatagaatattttccattgtattcctgttcgtattttaaaaatcttggtcacgacccactaaactcattacacggccttcagataggtcacaactggaactttaaaaagcactgcccagagtaaatcacaacggttcaacatccacgaatttacatggttctctctcctgggtgactggtgtatgtactggtgtacattctactgagaaggtaaagggctccactaggtgaactgtccaaggtcacaggtgccgagtgcccttcagatctggctgaggctctgtgcagaacggcttttcctgcgtggcaaacaccataccttgattgccagctgttcccaagaaccaaagacacttcccctggggagggaagaggagtctgtacaaaatgacagagcctccagccaaccagaactggcctactcagacccaccctcttccaggtgattggccccaaaagggttgccagccccactccaccttggggccagcttcccccaaaaggttgcatccccggcaggtccctcgcaggcagtccatcctgactgctcctgtgggtgcagctcctcaggtaaagggggaggagctgcttgttccagatctccaggagcaggccatttcttccccagctctaagctgggaaagtttgctccaggccatcctacctgcttccccatatggctctcaaggagggactcaggtgaggggggacaatggtatggagaggaagaaagcttggggacagctgagctaagagggatccagtctgatggctaaaacagtaccaaggggaggcaccagagtgagcccaggagtaccagctgagcctccagtcctggggaaaggtggctccgagaggggacattgccccaggagaagaaagacaatccgtgtgcatggacaccggggtgggggaggttgtattccacaagattttgtagccaatgaaaagctggactccccttgcttcccttaactctaaacccccttggcgagccggaaagcagagacccgggggtacattccctccccgactgtaactgagagctccctctatccccactgggactgatggtccaggactaggaacctgtgcccccttaagacctaatggctgatctttaaccctttcttgaagccaacgagagtggggagcagggcacagggtggagcttgagggaccaccttctgcaggtagaacctgaacaagaaatgtggaggagtggactgatcaggggcctccacagaccacgggctcccaggctggggcataggaggggcaggaggagctggtgggtcccacccagtcctgggtctcagcaccctcccaggcctgaccacaggagttcacaagaccaactctgcctgtgtgccctggctgaggcccagagcccagaataagcatcggtttgccctaccctggttgggaggaggctggtgaagagggtgggacagccacagagggggagaaagcccctccagccttttcctgctcctgtagtaccttacgcagtacctcgcacacctcccacagtgcacctcccgaggcagccttgccagctcccagtacggggtttgaccaggcttctaggaaccagagaagcccagctgcagccagccctccaggagctcagacaggagctgaatagagtgcgaagggaagaagccaagcccacggggagaaataacagggccgagaaccttgtgagatgagcctcagggctgagctaggcccaggtcaaatggaacccaaatgccatgctggaagctctggctgggggatcgggcagtcctactcaaagcccaaccccacccattacccgccgtgcaaatgccttggtgtaaagtgtaaacaggaatggcaaatgcctactgaaggtgcaccctgaaaacctgcagtaggttggggcttttcacctaaagaacacggatacttattggaggagaaacaagctgattagttgatccccagggggtagaactagggactggaaagcctggtgccccaggaggcagggaatgactggcaggaccctgagctgacaggggaggagaggatgctgagattggggagtgagccgtggggagcccccaggcaagaacgaacgccccatgtgctgcctcctctcctgctgctggagtgcaggccacgtgcgcaggtgcaccactggcctataggactctgggcagttcttttcactttctggaccttaattttccctttatggaagaaaatgaaaaccaggccccacctgagtttgttatatgtgtagcaaagagggagggaaccaaacctactcctaaaagaagatgtggtgcatctgattcacaccaatgaggccgcccagccttgcagaggtgagctgtcactgagatctgctccaagcctccatgcatcctctctcacacagtgaccctggcccagcccccttgctgagcgctgccctsaggtattgtgtgtcccctggacagcagtattcacctgagtgtcccaactcagtgcttctcaagctgcagtttgcatttccttgatctttccttctatgttctcagcgattgatcccagtgacccaaatggacccctgctttctcccctgagcaactgcaaccctaagcaagtgatttaacctttctaagcctcagtttcctcatttataaagtagacataagcacagcatctccttcaaggggctgtggtgtgcctttaacaggacaggcacataatacacttggccaggtatccgtctcartgtctgggattatgcataaggagtgcagacttaatcttgaagaaaatggagttttaagcaaaggagtaccagtcaacttggaagagagaatgaacacaaataactcattcgttgtttcattcatttgctgaacaaataattatcaatagcatgaattatgaggcagaggcataatgagtgaggcagacagtccctagcatcgcttggcaggtactggaggagaggtctgggaaagggacagaggcacatcctgggggagggacctaacggaggagatgtcaaggccagcttcagacaggaggaagctgggtgctgaggaatgatgcggagcttgttggctgatggaaggaagagtgcaatcagaacagaatacagaggtggggaagcctaggagacttcatagtgaagggtaaaagatggagactcggaggcagggtcaggaggctgttataggaatccaagtgagaaacaaggaggcacggataggacagtgagggaggccaggaggggagttttgggcactaggaaggaggcaaaagcaacaacttggctgtcgggagagaaagcaggggtcccacttgggtcactgggatcaatcgctgagaacacaggaaggggagagtgaatggcaggatgggggaggagtgagtagggggacggaggagagtgagtgggagaacccccagggtttgctgatgggctgcatgtggggcattaaattatttgtaacaatatttttatttaaaccagcacatccgaatttatacctgtttcactgttttaatgtggctactagacatgtttaaattacatgtgactcacactatacttccactggatgatgctattcaagatctcttcctacactcatgaaagaaygcggctatacgtgactgcaaaggctcgagtgcacaggcacagatgcttccccctgccagaagcaaggtctgcctctccgtattagttattccttccttttcaccttaacacattagggtctgttttccagagagtacatataaatctacctcacccttttcaatagccatgttgatttctattatacaagttgagcacccctcatccaaaaatctgaaatccaaaacgctctagaatccgaaattttttgagcactgacaggacattcaaaggaaatgctcccactggagcattttgaatttcagatttccagattagggatacttagccagtaaatacaatgcaaatattcaaaactccaaaaaagtccaaaatccaaaacacttttggtccaaacttttggataaaggatacccaacctgtatagagatgcctaattcattgatccagttccctactgatgaaccctggggttgttgcattagtttgctttttcagagaaggctatgggaacatcctgggactagtcactgcagagtctccattcctagctgcaggcaagctggccaggggctgtgagcactgacagtgttacagtggaggagctggacttgggaggcttctcaggcatggttaagagatgtggacggtgtcctgcactcagcaggaaaccacaaaataacttcaatttttttgtgtgtaaattgctaactttgaatttttccttcattaaaaaagcaacctactgtaaatacattacagaaaattgaggagaaaataagaaactaattttattgcacaaacacattcttccttttagtcttattttctgatgcacgtttttattcttgcttaaattgtaatcagagtgcacctcaattttagatcctgcttttttcctttcatgttcctgtatgagcatttttctacgtgactgcagagtcttcctaacacgtttatttgccagtcccttcagctggacactaaagccttcttcagttatatttgaggagctgagataatgcctctccctgtgacccaaaacgccttctctgtgggtgctttccaggcagcattcaaccaagctcaagtctcgcttgtgtaagggaaacaagcacacacccatcaatacaaccaccctgtcccctccagttgccaccccatctctgtcctccttacagcccgacttctggaaagacagccccactcccacccaacccatgtgcctctccttaagtcctctacctcctcagtctccctcccattcccacctggtctaggcctgggccctggcctcctctccctctgtactctctccctctctcccataacatccctgccctcctggcaaatcccagaactttctcctgagcctgcctgccttctgggctccagcccccttcctccaaccagacaaccaggcatcttctcctttctggtacctcagccccgtccctcaaatccatggccaagtcttgcccatgtgccctccctgacagcccctcaccacctattcctccccatccagctgccaactccctggtgttgcccctgatacctcccaggggctggcacctaactcatcttcctgcctccagcagtgccctccctgccaccccaccatggccaggctccagatttcagctggagtactttcaggtttgtggagggtttttttgtttgttggtttttgggttttttgttttgttttgttttgttttttcaaataaaaatctgactgagtcactccccagaggaaatacctttcagggctccccatgaccctcaagatgaagtccaattccccgagcctgacatgcgggccctgggtgacctggccccggctcacctctgcagcctcatccctccctcctcatctgctactacactccaccctgcagttccacagacattccaggagtgaggcttcctcacttttgcatactgttgtttcttttccatggacctctcttccccctccatgccttcttcacctgaagaacttctattaataattttttaggtcctaccttagaagtcaactcctcctccaggaggccccaactacctcctcatctacgaaggctcaggtgctactctccaatttgcctcatagcatctgatactgttcccaatcacagcattcattgtgccgtgttccacacatctgttttcagtgtgtcatgtgacccataccctcaccactgccccccygcccaactacacccacatcttcctgactccgcaccctgaagacagggtctgtgtctcattcacctctgaatccctgacttagcacagtgcttgacgctgagcttgtgtccaataaatatacgttgaatgcacgacttaacagaaactgatgaacatcttgatgcataaacttttctcattctgaagattatctcctttgaacagattcccagaagcttggaattattgaatcaaagtggatgaatattgaacactttcaattcccatagctaagtagctttccaaatggctgtagcaatttacactcccaccagcaagtgtaagagcaccaatctcactgcattcttgcagcttggctattctcattatgccttttatttttaaaatcaagacagggtctacctctgccacccaggctggagtccagtggcatgatcatagcttactgtaacctgtaactcctgggctcaagcgatcctcctgcctcagcctcctgaatagctggaactacaggtgcataccatctggctaatttttttttttttttttttgagacagagtcttgctctgtcaccaggctggagtacagtggtgtgatctcagctcactgcaacctccgcctcccaagttcaagtgattctcctgcctcagccacccaagtagctgggactaccgacgcgtgccaccacggccagctaatttttgtatttttagtagagatggggtttcaccgtgttggccaggatgggctcgatctcttgaccttgtgatccacccgctcggcctcccaaagtgctgggattacaggcatgagccaccacgcccagccccggctaatttaattttttgcagaggcagggtcttgctccgttgcccgggctgatctcgaactcctggcctcaagcaattctcctgccttgacctccgaaaacactgggattacatgcacaagcccctcccagccctattatgtttttttttaaaaagtgctcattttataggcaaaacataccaccttgttctaatttgtatatctttgattgccagtgagggtgaacatttttccatatatttgcctactaaatgcacttcttctttgaggatttacctgtttgtgtgacatggaaactgttaaggcaggctgacttgttatgagatgactctggggttgtggaggaagtgaccaggagcatgaagagtgctgctgcaatgatcccgtgacggaggagcaggcgagggtcactgtggggcacggggaagagcagggggagcagagatcaaggagaccaggtcaacccgggactgaaagcagacagcaggtgcagagcaggaggggtcagggtgcacccaggtttctggcttggcgcagtgaactggaggaggggctgtgctcagagacagtgcccaggtggatccacacacctgcaaggcagttcgcagcactctttactagacacacctgctgaggaacagcgacgtggggcagcaggagaggcaggggcaggagggtctgaagctggcggccttcttgaaagagaccaggggagccaggttttgaaaggatttgtaggccggacacggtggctcacgcctgtaatcctagcactttgggaggccgaggtgggtggatcaccggaggtcaggagtttgagaccagcctggccaacatggcgaaaccccgtctctactaaaaatacaaaaattagctgggcaaggtggtgggcactcgtaatcccagctattcgggaggctgagtcacgagaatcacttgaacccaggaggcagaggttgcagtgagctgagactgtgccattgcacgctagcctgggctacagagcgagactccatctcaaaaaaaaaaaaaaaaaaaaaaagaggaaggaaggaaggaaagaaggatggatggatggatggatttgtaggggcagggagtggagtgaggaggctgcccaggtgacgatcagggtgtgttcaggaagaatggtcatcactagataaagctgagtgaactattgcaacatgagaggccttgttctcaacgcttagcttgtgtgaaggcaatgacagccctaaggcaggagttcttattaccccatcctatagatgagactgatgtgcagaggaccagaccttgccccagggtcagagagctaatgagtggtggagctgggattcgaacccagggctctggcccccgtgtctgtgctccttaccacgtggctccagttgctctagatacgtgagtactcaggaaggtggggtgacagtggaacaagctccccagaaggagcttattaagattctcagcatttggagcccttcctggaaaacgaagtgtggacaaatcccaaagcccacctcttctgagccaagaattgggctgctgagctctgcttggaggagttcacctggcctggtgactggagccaccacagacacctggtctctgaccacagccagcccagtaactcttctctaagtcccagacagcttttaactcccagtgactgaggcgggaggattgcttgagctgagttggagacaagcgtgggcaacatagcaagaccccatctctaaaaaaaaaaaaaaaatacaaaattaggcgtctatagtcccagctacacaggaggctgaggtgggaggatagcttgagcccaggagttcaaggctgcagtgagctgtgatcacaccacaacactccagcctgggtgacagagtgaggctgtctcaaaaaaaaaaaaaaaaaaaaaaaaaaaactccgtcactgagccacaaacacttgtgcatcctctcctggcctctcctgtccaaggtcagtcccaccttccacccaggataagtaagtacctcaacccctaacgttatcatccccgcaacctgcccaaggtcatgcccctgcacaagaaactggtaacactggctaccttcatgcagaagaaccagctggctggaagtaagaaagacttttcatgtatgtgtgcatataaatatttgtgtctatacatataaatgagttactgatgcccccctcccgcccccagggcctggaagagaatcttctggcggcagatcctacttacacttggcctcttaggcctgtttctgtatggcctccctaaattcaggtaaaagcccctttccccagcacttgaggtaggaccacagtcaggtttaaaggggatctgtctaagtgcctccttgagggatggagggcagtggctaactcagctcaagtgtccttgtgagctctctctccttgtaagaagcaaagccagagggctcctggccaggctgacatgcttctcayggctgcctgccccccgcccctcaacccaccacaggcatctggaagccctcatccccatgggcgtctgcccttcggccacaatgtcccagctgagagacaacttcacaggtgccctgcgtccctggtaagaagctcccatccctcctactccaagggcacccccaaaccctacacagctctgccccatgtccctgccctccacacatctcccaccccagcagagccaggcactctgccaccaagtccagcagccccatcgggccacacatctcccagtcctctgtgttgctctgagctggaggcttccaggggcagcaactaggtctcatcggtctatgggtccctagggctcagcactggggaggtggcagtgaacatgcaccaagtgggtggatgaatggagctatttccatttcccatccctgccctggccagggcccggcctgaagttctgacctgtaccccctggggggctcccattatttgggatggctctttcgacccagatgtggccaagcaagaggctagacagcagaacctcaccattgggctgactatctttgctgtaggcaggtaaggcctgggaaggggagcagtgctgtcaaagctgtgagtgggaggggtgtgcatgtgatgaaggaggcggggcaccctgctcccctgtgccatgggatcccaaagtgaagcgagaagcaaagacagcacttcttgccccacacccccagatgagcacaggaccatccttctcctcctccctggacaccaacaccatagagcccgcccaacacaggcagccagggctgttctagaaccacatctggaagggacctgcctaggggctgggactcatccatctggaggcactggttttgtagtgagaaaatgatggagtctttcaggtgagagtggtgagaggaggggagtgtgactgggtaagtagagggatgattcactgcattcggtgcccattggaggtcagcagctcaggtgcaggtacataggattgtgggggcaggtgccaagcaagtctgatgaagggagaggggctggggagctgaaggattgcaagggagtgaatctgaactgggcagagggaagtgaagagaggaagggggtgacaaatactgaagtggcaaggtcaccagattagaggattcagtgaggtaggactgttttgggttgggggtggtaatcacagtaagtgagctagaagaacgaggtccttacagagtgggacagacactgatgaagatcaagttgagggagtagccatgggaacaggtaactgtgaagggaacaggtgaccgtggagggcacgggaaaatcactacaggaaaggaggtcaagagaagaaatggcagcggggtgctgacctccccactatggatgacagggagtgtctaaactgggtgtcgaccttcctgaagtgacacgaaggggactcttggctgacagtggcagtcagatcctataacctagtttcgggcaactaaaagargcatttctaaaagtggaactagttgctttgggaaggtggtgagagcctcccattcaggaaggatggggaaggaattttgttaccagataccccagacaactgttcaaggctcctcgaactctgtcccccacaccctacaagggagggaaagccaggagtgccactgacaggcaaggggatgaaaaggaccaagggctgccccgtggaccaggcgggcagaactgctgggctacttgggccttcgtctctcccaaggcctcggtgctcccacttccatcacacatgckgagtagggcrttcctgccccagccctagggtcagacactcaatgtacagaaaattctgggatactgaggtcctgagttccaagattctgagtccaacaccacgaaatgctgagatttcctaggtctctgattcccatttcccacagtcaccaggaatagagcaagtgcaagtaaaggtacaggctctaaggccaagctgggttcaaatcctggctcaaccacttaccaatggtacatacaagtttctaacgctctttagatgagacaatgcacattgacatagaaaacagtggctgccacatgataaaagttcaaagtattattaggcactgttactactattttaaagtcctaggatcccaaggtctgttcatacagtattccaggcagcctcgttatctatatagtgaaagacagtgacttaaaacaacttattattatagctcataaaataattcccctctccctctccccggtcttcctctccctggtctccctctccccggtctccctctccccggtctccctctccctctccctctctctccacggtctccctctgatgccgagccgaggctggactgtactgccgccatctcggctcactgcaacctccctgactgattctcctgcctcagcctgccgagtgcctgggattgcaggcgcgtgccgccatgcctgactggtttttgtattttttggtggagtcggagtttcgccgtgttggccgggctggtctccagctcctgactgcgagtgatctgcccgcctcggcctcccgaggtgccgggattgcagacggagtctcgctcactcagtgctcaatgttgcccaggctggagtgcagtggcgtgatctcagttcgctacaacctccacctaccagctgcctgccttggcctaccaaagtgccgagattgcagcctctgcccggccgcctccccatctgggaagtgaggagcgtctctgcctggccgtccatcgtctgggatgtgaggagcccctctgcccggccgcccagtctgggaagtgaggagcgcctcttcccggccgccatcccgtctaggaagtgaggagcgtctctgcccggccgcccatcgtctgagatgtggggagcgcctctgccccgccgccctttctgggatgtgaggagtgcctctgcctggccgtgacccccgtctgggaactgaggagcgtctctgcccgaccgccaccccgtctgggaggtgaggagtgtctctgcccggccgccccgtctgagaagtgaggagcccctccgcccggcagccgccccacctgggaagtgaggagcgtctccacccagcagccgccccatccaggaggtggggggcagcccccgcccggccagccgccccatccgggagggacgtgggggacagcccccgcctggccagccgccccgtccgggagggaggtggggggcagcccccgcccggccagccccccgtctgggaggtgggggggcgcctctgcccagccaccccgtctgggaagtgaggagcccctctgcctggccgccaccccgtctgggaggtgtacccaacagctcattgagaacaggccatgatgatggtggtggttttgtcgaatagaaaagggggaaatgtggggaaaagaaagagaaatcagattgttactgtgtctgtgtagaaagaagtagacataggatactccattttgttctgtactaagaaaaattcttctgccttgggatgctgttaatctataaccttacccccaaccccgtgctctctgaaacatgtgctgtgtccactcagggttaaatggattaagggcggtgcaagatgtgctttgttaaacagatgcttgaaggcagcatgctcgttaagagtcatcaccgctccctaatctcaagtacccagggacacaaacagtgcagaaggccgcagggtcctctgcctaggaaaaccagagacccttgttcacatgtttatctgctgaccttccctccactattgtcctatgaccctgccaaatccccctctctgagaaacacccaagaatgatcaataaatactaaaaaaaaaaaaaaaaaaaaaaaaaaaaaccaactttgacatgacaaaaaaataataataataattctgtggagggccaggcgtagtagctcacacctgtaatcccagcactttgggaggcccgagacgggaggatcacctgaggtcagagttcgagaccagcctggccaacacggtgaaaccccatctctactaaaaatacaaaaaaattggccgggcgtggtggtggccacttgtaatcccagctacttggagcctgaggcaggagaatcgcttgaagccgggaggcagaggttgtagtgagctgagatagcgccactgtactccagcctgggccacaggagcgaaacgctatctcaaaaataataattctgtgtgtcagtaattcagacagggctcagcaggaagggctcctcttctcatgctctcaaatgtctgcgtctcagctgggagaccaactgctgaagactggtgggggccagcttaggcttcctcactcatggcagcacccaagttctgggacttcttmtatggaggcttagagctctaaagagagaaacgctgccagtcgtccaaagggccagtatgaggcaggagtggcaggcaatttgcaagcatcttcagtccaacctgccctgccccatctaagttgaaagatgctagggctagagggtccggagttccaaggccgggtgtggggaggaccaggcagcactggtggggtgggggtaaggttgcggtgggggtgaggtgggtgagggtgaggtgggtgannnnnnnnnnnnnnnnnnnnnnnnnnnnnnnnnnnnnnnnnnnnnnnnnnnnnnnnnnnnnnnnnnnnnnnnnnnnnnnnnnnnnnnnnnnnnnnnnnnnnnnnnnnnnnnnnnnnnnnnnnnnnnnnnnnnnnnnnnnnnnnnnnnnnnnnnnnnnnnnnnnnnnnnnnnnnnnnnnnnnnnnnnnnnnnnnnnnnnnnnnnnnnnnnnnnnnnnnnnnnnnnnnnnnnnnnnnnnnnnnnnnnnnnnnnnnnnnnnnnnnnnnnnnnnnnnnnnnnnnnnnnnnnnnnnnnnnnnnnnnnnnnnnnnnnnnnnnnnnnnnnnnnnnnnnnnnnnnnnnnnnnnnnnnnnnnnnnnnnnnnnnnnnnnnnnnnnnnnnnnnnnnnnnnnnnnnnnnnnnnnnnnnnnnnnnnnnnnnnnnnnnnnnnnnnnnnnnnnnnnnnnnnnnnnnnnnnnnnnnnnnnnnnnnnnnnnnnnnnnnnnnnnnnnnnnnnnnnnnnnnnnnnnnnnnnnntgaggtggggaggccgggcccgcctcgcttcactctcaggctgacggtggcgccgcgcccttagatacctggagaagtacctggagcgcttcctggagacggcggagcagcacttcatggcgggccagagcgtgatgtactacgtgttcaccgagcttccgggagcggtgccccgcgtggcgctgggcccgggacgccggctgcccgtggagcgcgtggcgcgcgagcggcgctggcaagacgtgtcgatggcgcgcatgcgcacgttgcacgcggcgctgggcgggctgccgggccgcgkggcgcacttcatgttctgmatggacgtggaccagcacttcagcggcacttttgggcccgaggcgctggccgagtcggtggcgcagctgcactcctggcactaccactggccgtcgtggctgctgcccttcgaacgcgacgcgcattcggccgccgcgatggcgtggggccagggcgacttctataaccacgcggcggtgttcgggggcagcgtggcggcgctgcgcgggctgacggcgcactgtgcggggggcctggactgggaccgcgcgcgcggcctggaggcgcgctggcacgacgagagccacctcaacaagttcttctggctgcacaagcccgccaaggtgctgtcgcccgagttctgctggagcccggacatcggcccgcgggccgagatccgccgcccgcgactgctgtgggcgcccaaggggtaccggctgctgcggaactagcgccgccgccggttcccggccctccggcttctccgccggcccagccggcccggcctcactcccgctccgggcgtcttcggccccgggaaggtgtggagtgggagtcactagaggaagagatcctgaaaccgggcggggcccttctggacgctgatggcgctctggagagcagagagatactggatacaaaagccctacccgcttcgtgtgcgccagtccgtgggagtgggagtaggagggagagctcctcgcctttggggagctcctcacttcaagagaaaaatccccttcccttagcttagcagtgagcgaggctcaactgcagtagagccccgagctatcagcctatagacctttcacccctgagcctgcagaatgcagctggtgtctctggagatgttttagtcccacctgcaaccccttttttaaatgaggagactgagatacaaaagaggaaacataactgcccaaggacacagagggtccgagtcactgtgatgtcagcggctggagaggcgtggctggcccctcgggatgtctctgggcaggagccacaggaagaaacacagggggcaccccgtcattcgctctgcccttttacctcccctgctcataagcatggtttgtacatatttcagtaatattatgataaattattcctgtgctgcgagacaaagtagcaaacataagaagccatgtttgctcctttcccttgccagcataatttcacaaaaccctaactgtgacagcatatagctgtcaaaacaaaaaacacagctccccacgtcccttgccagagtcactatattccctaaaaaaataagtgactctagatatatctccatataagataatgtcagttggggttaatgatcatgcttctataaactataaccagatacactcttacatacaaacttagatataattttacgcatactgaagcttcaccacctatatctaaactctaaactaaaatactacattcaggccgggcatagtggctcatgcctgtaatcccagcacttcgggaggctgagacatacagatcacttgaggttaggagtttgagaccagcctggccaacatgatgaaaccccatctctactaaaaatacaaaaattagcagggcgtggtggcacacacctgttaatcccagctaccggggaggctgaggcacaagaatcacttgaactcgggaggcgaaggttgcagtgagccgagatcgtaccactgcactccagcctgagtgacagagcaagactctctctcaataaaataaataaaatactacattcaaagcgtctgatagaaccttctaaagagctcctcccgggccataggccttggtcgatggtcctcaataagacttctaagtgacactaactttaattatttaaaaacttacttttattctttagttgacattcccaaattgttattatggctttttctcctagacaaagtccaaaatgacattttctggcctgggggcgatagcagggcgacatttggccacagtatctgggagggaagtttccacatccgcggcagctgtctagacttctgatccccagtggggaaacacaggctctgaataggagtgtgaaggcgtcagaccctcccaggaaggtggtcacagagccaaggagatagggaaggtagccactgaagcccctgagattttgtctgacatttgggaaaactggggccctgagagactgggatttcaccctggctctcctgaatcttttatgtagtattgtcaccaaccttgcattttaatagcctccactcccaggtagggcagcaattcttgctatttaccaggcccagctattgacaataagagagatctgtcctctcaaaagcagttcaaaatgtctcctgtctaaactagattagcaaaacccagaaggtcttctggactcaggattagagatgagaatgggccacgtgtgtcagaacaggcaatttggccgggcacagtggctcacacctgtaatcccagcactttrggaggctgaggcaggcggatcacaaggtcaggagttcgagaccagcctggccagcatggtgaaaccctgtctctactaaaaacacaaaaattagccaggcgtggcggtgggcacctgtaatcccagctacttgggaggctgaggcatgaaaatcacttgaacctgggaggcggaggttgcagtgagccaagatcgtgccactgcactccatccagcccggatgacagtacgagactccgtctcaaaaaaaaaaaaaaaatttctgcctgtgagctggggaagatgtgtgtcctccaccttaccctgcagcattcactgagggccacacgtgctgaccctaacaattgctgcagaccctaacaattgctgggccattcaatacctgagcatgagccagcaagagatgatgtgaactggctcttcttctgtgtgtgggtagacaagttccttacctttgctggcctcagttttctcatacgtgaaatgtggatgccactcttcctccctgcaggggttgtggtggtgctctagaaaacacaacttgccttcctctccgtgcctgccctttctccagcatgctcagagagtgcaaaggatttgccaaagaacagtcatttcctgttttttgtttgtttgtttttgagacagcatctcactctgttgcccaggctggagtgcagtggctatgatcatggctcactgcagcctcaacatccctgagctcaggtgatcctcccacctcagcctcccaggtagctgggactacaggcatgcaccaccacaccaggcttttttttttttttttttgtagaggcggggtttcaccaagttgcccaggctggtctcgaactcctgggctcaagggatccacttgccttggcctctcaaagtgctgggattccaggcatgagccactgtgcccagccagtcatttctgttttaaagggggaataaatggcatgctcaggagtttccaaggcgtggactggaggcagccttgcgttgttggggatcttcttgaggagggaggggttccaggaagctgcagggtgggcagcccttgggaatggctcccctcctagtgagcccagaggcctaaggaggggttgtgggggtgggtacagagggacttggatctaaagcaggaataacaagagggctaaagctccttctgcagttgcctccattaccatcaacactgtcctcagcacctatcctgaggctcccccaggggcagtggcactcactccccacgtgagcaagtgaaaatcagactcagtcccctcagcatcactgctacatgcaaaatctccacctgtcccagccgccccgccttgccatgcaagctcaaatgccacccctagaaattcccaaacatcttcagctctcagtcagggatcactgatcataaggatcatagatcccttagggctaaggcaaatagcagcaataatgatgtggacatatattgggtcttacaacgtgccagttctaagcattagacaggtattgattcatttaatcctcacatccacactgtaagttggttactactgtttacctcattttacatatgaggagatcaggcacagatttagtaactaacacaatgtcacaccactagcaacttaaactcattgaagtgagaacaaacaggagattaaacatagccagaggatgaagacggacaggaacagaggttaccactagctcttggtctccttggtccatttctgctctttctctgccggctttgttcttctgcttgtgtccagctcaacacagtcaccccaaaccgcagtctacagggttttccagttcaggtacccaccatctcctaacttgttcctaattcatggaatagagaatctgacaggagagtcagctccgtccggtggtgtgctggtgtaagtctagcagttgactggggaaaaagaaagccctgatttatagtgttggccaatatccatggtgtaaatcccaccatggctgatttcaagctaccagtactccctgaatgcagagcttggaagaggtgtgcacaattttctcacatgaatcaggacagccattatgcaccactggctgcacctatgtatcaagtcagagtcaggtgtccacccctggccaatcggctgtggctgcaatggggtcatgtgacacaaatatggctgccagagcccatcctttcatggcaaagcaggctatgggaggtcaatttcagagaaagagatgaggcccctgagattactgaaaacatgctggttcttggctaccacacatccatttcctcttctgatagtaacacactctggtttcctgttagggaacctcttgtgcttcagaaagtaaagaaggtgagggcttcaccctctactccaggcttagagcatgggccctaggcccaagccaaacaagcacacaacatgatgcagttagaaccaggaagacccaattagacttttgctgggtgctatggtttgaatgtgtccccccaaaaaaacatatgtgttggaaacaacccccattgcaacagtgttaggagttggagcctagtgggagttgttgggccatgggggctccaccctcatgaatggattaatgctgattataaaaggatatgaggcttcgagttccatttttctcactctcaccctctttttgagatggagcttgttctgtctcccagtctggagtgcaaatggtgcaatcacggctccccacagccctgacctcccaggctcaagcagtcctctcacctcagcctctcaagtagctgggactacaggcgcatgcaccaccacacctggccaattttctttttctttttttttgtggagacaaggtctccctatgttgcccaggctggtctcaaactcctggactcaagtgatcctcctgccttggcctcccaaagtgctgagattacaagcatgagccaccaagcctggcctcaccctctcttgctcttctgccttctggcatgagatgacatggcatgaaggccctcaccagatgctggcaccatgctcttggacttcccaacctccagaactatgagattggaatttatcatgaacagaatgaaatttctgctcattataaattactgagtttgtgatatcctgttatagcagcataaaacagatgaagacactgaggcttttgtcagagagacaagaggcttgattgctggaaccctggggactgagagactagagctgctgaccccacaggcgcctcaggctgaagctgactcagaacagagtggagagctggagacacatcctttgagccctgaagctggcctgaccactgtcctgttacataagccaatacacccttgtttggattggactttctatcacttgcagcaaagtcttgacacatgaggactgtgaggactcagggaaacgagttcgaaccaatgatgacctccatggtagatgacctccatgatgaccttccatggacagtggaagcactgtccccctcacagtgcttccacagggccagacttgataagcttttggggattttattactaaatttccttcctaggcagtcaaaacattgactcctatggggaaaaaacaatgtatgacaaggatgtcttggactccccctccaatcactagaatcacttccacaaatcaggcactcatgatggacccccccccccacataggtggggtgccccctcagggagcagtggaagtgagacttattggtggacctagtatatccaagaaggctccagaactaggcaatgctgggtcagtttatgtcactgccactatactgcagcatgatccttagcaaagggcctctcttggtttgctgcccacttcttagggagttgtgaggcaatcaacataaagcactcagttcagcacctggagtgaggccagcccacagtgagaggccactttcttccttctccaagtctggggggcgggggaggggagaggagcaatggaaag

SEQ ID NO: 95900 - DNA, 54577 bp, Homo sapiens
  misc_feature (1)...(54577): n = A,T,C or G
tgtgatccgcctgcctcggcctcccaaagtgctgggattataggcgtgagccactgcacccagcctagttcatgcattcttttagaagatattttttgagctacaatcatcacacaccacaagctgcatatgtctctttatgatttccaacaaatcaaggtatagctcctgccctcataatgtataatacgtaatgtataatcttaatgtataatcttgctagagaaacaacactgaaaattaaacaccaacatgagataatataaaatggtatggacaataaagtactagagaaagagaagcaaagggagggattatagagttctagaattagaagggacctagttaaacttactcatattagaaatgaaatgggagaaaaagaaatactaaatacctattataaaccaggtgctctgagacacattttacgactctaacttagcctctcaacacaattctgtaaaattaatcttatcaaagaaatcattttgttgtatttaaacctagagctgctaaaacttattttattttaccaatactatattccagcaattgttgagagttctaggtgttgaagcagctgcctctatgaaaagtaatttctctgcattagtgactgagttattcatttctttaggaagcagttagaaaaaaaagtttagtatggaaaacattctttgacttaagaaaatttatggttgtcagacacaggttatcacaggcactggggttaagcagctacatttcttagatgccctttctgggccattgccccccattctaactccttacaaaaggtctagttcaagcccttggttggccaaatggagagttcaatagatttttccctcttgggaaactaaagttcagaagcatgaagtaacttaactgagtatacatagctaataatgttagaacaaggatcgaaacccaggtctaattccaaatgcaatgtttttcccactacatctgtgacagacttgcacaggattggtcagcaaatggcagagctagaatccaaactcaggccttctaaattcagtacaatctataacaaactgtgcaagagtaaagaccaaagagggcttttggtctcttggaaaaaatattttaagccaccttaataggaccaatatccttcgtaaccattgcaataatcaattcctacacaacatgacattcagatgcaaaaaaatgggcttttctgagcttcttatgttccaatagatctgggaacaaaagtatacaaaacaataccatatatatggtatatatagagaggaggagataattttaatttgtacaaaccattctctttctgatgtctgatgttacttcctctttttttttttttttttttgaaacggagtctagctctgtagcccagactggagtgcagtggcgcgatctcggctcactgcaagctctgtctgcctcccgggttcacaccattctcctgcttcactcagcctcccgagtagctgggactgcaggcgcccgccaccacgcccggctaatttttgtatttttagtagagacggggtttcacagtgttagccaggatggtcttgatctcctgacctcaggtgatccgcccgcctcggcctcccaaagtgctgggattacaggcgtgagccaccgcgcccggccatttcctcattttcaaaagtacttattataaagaaagtaaaacatatacataagtaacataatagtataatgaaccaccacatacccatcactcaaccccaatgactatcaactcatagctaatcttgccccatccacttcccacctttaccagattgttttgaagcaaatcccaggcattgtatcatttcatctgtaaataacaagaattccttatcataaaatatacagttcagatttccaattatcttatgtcatatttttttttaaggctaaaaaataatcagtatccaagtaaggtccatacaatgtgactggctgataatgtcttatgtgtattttaatctaaaaatttcagatcttttccccctgcaattactttattaaaaaaacaatacgcgagatggcttacgcctgtaatcccagcactttcggaggctaagttgggcggatcacttgaggccaggagttcgagaccagcctgaccaacatggcggaaccccatttctactaaaactacaaagaaaatttagctgggcatggtgacgcgggcctgtagccccagctattcagaagtctgaggcaggagactcgctgaaacccaggaggcggaggttgcagtgggcagagatcgcaccactacactccagcctgggtgacagagtaaaactgtatcaaaaaaaaaaaaaagaaagaaagaaaaaagaaacaggccaggcgcagtggctcacgcctgtaatcctagcactttgggaggccgaggagggcggatcacgaggtcaggagttcgagaccatctggaccaacctggtgaaaccccaactctactaaaagtacaaaaattagctgggcttggtggcgcgcacctataaccccagctattcgagaggctgaggcaggggaactgtttgaacccaggaggcagaggttgcagtgagcccagaccgcgccactgcactccagcctgggtgacagagcaagagtcagtctcaaaaaacaacaacaaaaaagccacaataccacgtattatgtatggatacatatatcacaaaattattaaaatatgcatgaaaggccggaattcaggatggtcttgatctcctgacctcgtgatccgtccgcctcagcctcccaaagtgctgggattacaggtgtgaaccaccgcgcccggccaatgttttatttcttaagaaaacaatatctcatcttaggctacatgacaataaataaataaggaaaaaaaaatagcaagaagagacctgaaacaaatatggcaacctaagacaaagcagcatgctaggtataataatgttcattattatgttacttttacactgttaaattattgttatttttttgagacagggtctcaggtttgttgcccaggcagaaaacagtggcgtgatcatagctcactgcagccttgaaccccagggctgctgggactacaggtacacaccaccatacacagctaattttttatttttattttttgtagagacatagtctcattatgttgcccaggctggtattgaactcctggagtcaagcgatccttctgcattggttttccaaagtgctgggattacaggcattgagccaccatacccagccactatacttttttatatgcttgaaataataaaaacatcttaaaattatgaagtcaatgggaaagatacaatgattatactctgtgaagtatcaaatgtcctcatatatcacagtacctacctgatagggttgtggcaagaattaaatgagatcgtgaacataaatgtggcacactagaggcatggcataagagacaaataactggtggccatagttattatttcaccccaccaccatcattgccccgatccctggagtcttaagagaagcatagggccaggcgcagaggctgattcctgtaatcccagcactttgggaggctgaggtgggtggatcacctgaggtcaggagttcaagaccagcctggccaacatggtgaaaccctgtctctactaaaaatacaaagattagccgggtgtgtggtgcatgcctgtaatcccagctacttgggaggctgaagcaggagaatcgctggaacccaggaagcggaggttgcagtgaactgagatcgcaccactgcactccagcctgggtgacagagcgagactccatctcaaaaaaaaaaaaaaaaaaaaagcataggaacggtaggaaaaaagagtgctaaactggtagggaatttcccctagaccctgcttgaaattatctaatatactctactcttatctagtttaatccagcactcaaccatattgtcactgaagaccagactaggtagacatctgaaatatccggcaaattatgcaaattaatgttcactgaactatcctttatagaggtactggacctcagcaattcacttcaagtctctgaacttcaatacagatgagaacatgcatctaaaaagggggtaaatactgttaacttcaaacacagattatcatgagaaaaaataggatgtttatgaaagtactctaaacctaaaagttctatactaaaaaaacatggtatttaatgaatgtgcaaggggggaaatcctcatataaaactgaagttcttcagtgaaattccaaagacagccttacttattacttctctgtcaaaagaaggcttgcttacttctctgtctaccatctaccacctttcttagcacttgtctggtaacctccacttaaaatatggggacccctttatttttttattttatttttatttttgagacagggtctcactcaatcacccaggctgaaatgcagtggcgtgatctgggctcactgcaacctctgcctcccagtttcaagcgattctcatgccacagcctcccagtagctgggattacaggcgtccaccatgctaggctaatttttgtatttacagtagagatggggttttgctatgttggccagtctagtcttgaactcctggcctcaagcaatcctccggcctcggcctccccaagtgctgggattacaggcgtgagccaccatgtctggccatatcccttcatttttaagggaagaatatttttccgatcttctaattctatttcttagttcctctacaccccatcctttctgtgaccccattctgtccttccacatctctctcacctgtccacccccttcttcacacttcagtttaccaccccctctctgttctcgaacctcctggttgcaacctcagaaactggttccctttctatttttatctcacctcagaaaacctactgccttcgagcacaaagccttactttattgaggccactaaaactgcaacaccagatgcaagcccacatcctctttcaagctctaaagtcaagaccattaccaagcagggtctgacaggtacagccaagagcagagattatttccagtggacaagacctccccctggcctttgatttccaacctttcccaaatgcaatacatgtgaagcacacagcacgaaacgcactcagcaggctttatcactccataaaaaataggcacaacatttacaaaaaatcaaaaagaactgaaattatctgtaacagttttgcaaattccttcgaagtaactaaaaacactgcaggacggaaaaaacaacccagggctgcaaatctttgctttaggtaacatttcactagatgagggtgccaggattctcctcccacatggacacagagaacagatgcgctaagctgcagcaacaggtttcttttcaaaaagaaaatgtgctttaaaacacttcaggcaggtctggtagagcttggagtccctaataaatacacaaaacaccggagatcaggttagggcaggccgtgggcaattcaaccacttctaggacctttccagggcccactgaggtaataactgctttccctcttgccctggaagtaactggtgacgccgcctccagcccttgaggagccggagaaagggtggcccaggcccaacctttggaggatactgccttggctctctctcacaaatgcaacggcccgggacggtgtcgccttccaggaagggcctttgcgtctccctcccccggggacaccgcgaattcccgcctcccggcggaaagcgggagaagcgagagttttctccccgcccctcccccagtaggggcaaacccgcccctcagcaggcctgtgctgtgcgctcctctcccggggaccaccgtcctcagatctccccagggaatgggtcgtcctcttcctgcccccacccgcgagacgcggcagaaaagcccgcggctatcttcccgccagcaacagcctcccgccgagccggccgggacagaggcggcccccacccccastgggcaggggactgcagacggcgctccccgactctcaagacgaccagggagcttcccttttcctcagcggggtgaggggcatctgtcgcccgccgacttggaggtggaggggcagggacattccctcgccatcacctcaggagctagaacgcgcccttctcgcagcagggcgtgggcctcccaatccctccaaggggcggacggcgtgcgcaaccccctggagaagcaacaggcgcccccatccccctccaagccgggtaacgccgaccccctcgtccctcccgctcttcacctccggaagccgggccaaagcctgggcgaacgactgcgcctcactccgccccctgcgccattttatcgccccctccccgacctcccctaccccgagtcagccgggccaacaccagggggagggcaaaccagcagtgattggcaggaaaccgtcccgcctctaggagggttgtgccccgctcargcgcctcagccccgccctccgcaccgcccaccgtgcccactggctccaccttttcccgtctcatcgacctgctcgactctctgctgctcctcactttttccggccgctgccggaggggtccaggccgagtaagcggagcgccgagcccagctgatgcaacctggctggactcgcgtgacagttcccggcacgcggcggcgacggtgacccaggaaggggctctggtgccgggctgagcgggggaagcaggggtagcggagccatgggggacgctcccagccctgaagagaaactgcaccttatcacccggaacctgcaggtcaggcctggggkttggaaatgcgccgttggggattaggagcccgaggttcagtgattttgagccccattacggggttctaagtatgtggggccggggactcggcgctggcgcagctctgagagagcctgtagatctcactgctggtcggtcagtcaatcaagcagcccttcyctgggttccccagaaatcacagtgggctcacctcttgcgtccagttgtcttgtgttggagccaaactttgaatccaggactcccattccacccccctattaagtgccagacgtggtgcttagtcgctggggatacgtcaagggcctgccagagcttgtctgaaggggatcagacgttaaaaatgacccattacggttcaagtaagtactggaagatgctatactgggagctttaaagggaaagagagaagggaaggcttccctgaggaagtgacctccaaactgcgccttgaaggaaatggatccccccccctcactccacaaatgttccgtttgttaccaagaactacaggagtagaagtgaaccagaggaagaatggaagaataaggagggagagcatttcagatggaggaaacagaaattgtggcaaatttagctggagtggagtgagcaaagttatgaggaagcacttaaatatttatattgcttaccccttaactttttcaggcttctgactgttgtcaccttatcagcgacgcatgatttccgaccactttatttaaataacaaaccctctggcaccagaactgccccataccttgctctgccttttttttgttattgtttctacatagtatacattttatttatttgtttaagagaggtaggcagggaccaagtcacgggagccttgcaggccttattctgttcaattttaaattgggcttccttctaagagtagtgataaatcagttgggccacacagcctgttctgttttttctttttagagatgtacttcacatactataaaattcacccttttaaagtgcacaattcagtgggttttagtatgttcacaaggttgtgcaaccatcacactatctttttttttttttttttttttgaggcggagtctcgctctgtcgcccaggctggagtgcagtggcccaatctcggctcattgcaacctccgcctcccaggttcacgccattctcctgcctcagcctcccgagtagctgggactacaggtgaccgcccccacgcccggctaattttttgtatttttagtagagacggggtttcaccgtgttagccagggtggtctcgatctcctgacctcgtgatccaccctccttggcctcccagagtgctgggattacaggcgtgagccacggctcccggccacaaccatcacactatctaataaaacttgcacccgttagcagacgctacctattacccactactcctagccttagagaaacactaatctactctctgtctccaggtatttgcgtattctgggcatttcctgtaactagaatcatacaatatgtttgttgtgtctgactttttgcacttagcataatgttttcaaagttcatgcatgtatttgcacctagcagaacgtcattcctttttatggttgaatgatactctgttgtatggatatacattttgtttatccgttcatcagttgatggacatttgggttgttccatttacaacttagtcttaaccaaaggtttttgcacgcttcccctagctagattctttgtttcctattctctctccataaaatagtgctggttggagactaaaaatacacaaaactattagaattgactcaattgggttttttgttttggggattttttttctggaacggagtttatctcttgtcggccaggctggagtgcaatggcacaatctcagctcactgcaacctctgcctcctgggctcaagtgattctcctgcctcagcctcctgagtagctgggattacagacgtgcaccaccacgccgggctaatttttgtatttttagtagagacggggtttcaccatgctggccaggctggtctcaaattcctgacctcaagttatccgccaaattcggcgtcccaaagtgctgggattacagagtgagccacagtgcccggcctcactcaggttttaaaggctaagtaatgtgacatcttcttggatggtgagaaccctccaagtgtccacgttgtcaggggtgctcttgagcatgcgggatcagctgccaaaagacttggagcacaggagtttaacaagtcctggtaaaacatgattcaaaccagcagtctatcatggtttctgacagcctcccaaaaccgtaacttgaggaaacactacaacctcttatcggggtacactggcctgttagaatttttccaatactgtcataggacaaaaagaaatcattaaaggtttgtaaaaaggaaaatgagttttaaagaagtttttgagttttaaaagactgtctctggctaccttttagaacatggattggaggggccaagcgcagtggctcatgccggtaatcccaacactttgggaggcccacacgggcagatcacttgaggttgggagttcaagaccagcctggccaacatagtgaaaccccatctctactaaaaatacaaaaatttctctggcctggtggcgggcacctgtaattccagctatttgggagactgaagcaggagaatcgtttgaacccgggagcagaggttgcagtgactcaggattgcatcactgcactccagcttgggtgacagagcaagactccgtctcaaaaaaataaaaaagaacttggattggagggagtaagagtagatttgggagacctgttaggagaatgttacggtaatcctggtgtgatctgatagggcctggatttgggtggtgatgtagaggcagagagaaataggagggttgaagagcagttttggagtccttgaacaactctaaatgatggtaccatttactgtagtaggagtgaaactatcagtgaaaaagatggttggggagtgaagtaagaagtcaagagcatgagttttattttgaacacgttgagtttgaatgattgggttgataacaagaacacggttctgtgtatgggcgtaagcaggagatttgggagttactggctcatagtagtaattgaagcaactgaaggggatcagttaaggagactgtagagtaagaagacaaaagaccagagccccaaagattgctaatatttaatgactaggaaaaataagaacagttgcaaagaaagctaagcaggcagagacgaggaaaactaagagaataaaataaaggagaccaaaagaggagaatgcttctgggagggagtgaggactaaaaaatactcactgaatttagcaacgtgaaggtcttctgtgatcttagcaagattatgtgtgatgtgatatggaatttagtagtatgatgtagtatggaattaaaattggaatgrgagattaggaaatggagcccaaaagaagagacaactgttacaagaaattggctatgaaaggaaggagagtgagttagaggcatgtaaaccaaaaagtatctgaggccaggtgtggtggcccacacctataatcccagccctttgggaggctgaggcaggtggatcatttgaggtcaggagtttgagaccaacctgaccaacatggtgaaaccccatctctactaaaaatacaaacaattagctgagtatggtgttggacgcctgtaatctcagctactctggaagctgaggcaggagaatcacttgaaccctggaggcggaggttgcagtaagcggagatcacagaactgtgctccagcctgggcaacagagtgagactccatcttgaaaaaacaaaaagtatctgagacaagtctcaattaatttagaggtttattttgctaaggttaaagaccatggcacctgacacagcctcaggaagttctgagaacatgcgtccaaggtggttgggttacagcttcgttttatacattttggggagacagaagttacaggcaaaaacataaatcaatacaagtaaggtatacattggtttgcccagaaagggggtgggggttctaggttctaggtggattcaaagatttcctgactggcaattgattgaaagagttaaactctgcctgaagaattgaagtcagcttgagttaagataaggagggttgtggaagccaaggtttttttttttttttttttggagacagagtgtcgttcttgttgcccaggctggagtgcaatggtgcaatattggctcactgcaacctccaccttccaggttcaagcgattctcctgcctcagcctcccgagtagctgggattacaggcgcctgccaccatgccctgctaatttttgtatttttagtagagatggtttcaccatgttggccaggctggtctcgacccctgatctgatgatctgcccgccttggcctcccaaagtgctgggattacaggcgtgaggtgctgcacccagctgaagctaaggttcttgtcatgtagatgaagcctccaggtagctggcttcagagagaattgatggtgaatgtctgttatctgaccttaaaaggtgtcagactttccagaaaagacttagtgtggggaagagatttctctacagaatgcaaatttccccccacaagagagttttgcagggccatttcaaaatatgtcaaagaaatatcttttggggtaaaatactttgatttcctttagggcctgctatctgtcatatggtgctataccagaatcagtttggaatttggtatcttattgctacagagagtttgttttgtcagtcttactatctgtgttttaatgttcatgctggtcagttgtgtctaaactccagaggatcaccaggtggggtggctcacgcctataatcccagcactttgggagactaaggccagaggatcacttgaggccaagagttcgagaccagcctgggcaacatagtgagacttctctactaaactgaaaaaactagccaggcatacatgtgctggtagccccaagctacttggaaggctgaagtgggaggattgttgagcctggaggtcaaggctgcagtgagctgtgtttgcacaaccggactcctgccagggcagcatagcaagaccttgtctcaaaaaaaaaatgaataaatatactccaaagggagaagggtataatgaggcatgtcagacccttccttcctgccttggcctgaactagttttttaagtttctttgggatcctgttggccaaaatgtggggtccattccgacagttggggggcttaaagtttagttttggtttacgggtagctgctgcaggcaaagatgcagttaggggcatgtccccactccccaacatcaagggtgatactagcagcagcaccaactttacattggctctccgcgttgtaaccgagcgagttatagagaaacgccacactctgagatgaattcaggagtcctttattagccagcgaccgagagatggctagtgctcaaaattctctccgccccgaagaaggtgctagattttcttttatactttggtttagaaaggggaggaggagcctagctgaagcaatcttacagaagtaaaacaggcaaaaaagttagaaagacaaatggttacgggaaaacaaacagttccgggcgcaggggctttaaatccatcacaaggtgatagacgcggagrctttgggtaccatcaaccagacacaaatgctggggcttagggtaatatcaactgggcaaattcctgggaactgcggctatagctttccacaatatcttatcagttatttgcgttctttgatgtgctgggagtcagcttgcacaagttaagtccttgaggaaggggggtgggtaagaggctgcaaggggctacaagtgaaggagccaaaatggagtttgtctggctctctcagctaagggagagtcaattcagattaaaacaaggtagggtatcacatctgcactgagaacatggctggacctccttgatggctctgagcctggatctccactgacacatgctgttgttttccttgtcacatggtaaaggatgagcaaggtgaggcactgacattaaactaactcttctgcttccacaataggaggttctgggggaagagaagctgaaggagatactgaaggagcgggaacttaaaatttactggggaacggcaaccacgggcaaaccacatgtggcttactttgtgcccatgtcaaagattgcagacttcttaaaggcagggtgtgaggtaagaactaatgctataagcccttggggaatgacccaagggagacccaagagagacttaacaaggacagggtggggctggaggagayaggttggaggtaattggacaaattcacattttggtggccccttatctcttgtccaggtaacaattctgtttgcggacctccacgcatacctggataacatgaaagccccatgggaacttctagaactccgagtcagttactatgagaatgtgatcaaagcaatgctggagagcattggtgtgcccttggagaagctcaagttcatcaaaggcactgattaccagctcagcaagtaagtgcttgatcatccaccctccttgtggctctggtgcttctagctaattacaggcctgtggagtccaggcattctttacatttagattagaagctgtctggcgtgacctattaagaaccatttaaaactttgtccattaaaacctcattgtccttgtaattcatccatcagaagtgtactgactagtaaatgccttaatactgtcctatttgctggaaatataaacgtaaccaaaacaaagtccttggccttgcagaactcacagcatatgggagagtgatggtgaacaattcagcctccctttctcttccagcctcagcaaataataataaaagaaatgtgaaagaaaaatatttcacttatttctcaccgccccaacaattgttattgctttttatctttgtgagttttgttcatatttggaatgttagcatagatatttcgtgtcctaatgtttaacttactctttttttttttttttgaggtggagttttgctcttgttgcccaggctggagtgcaatggcgcgatcttgactcactgcaccctctgcctcctgggttcaagagattctcctccctcagcctcctgagtacctgggattacaggcatgcgccaccacacccggctaatttttgtatttttagtagagacagagtttcaccatgttacccaggctgacctctaactcctgagctcaggtgatccgcccacctcggtctcccaaagtgctgggattataggcataagccactgcgcccagcctaacttactctttcttaacctcagatatgcatttataagtacatagcgctctattagtcacttttgcatttaaacccttagaacarctttttaaagtaagcattattttgctaaggaaattaattcagatttaactttcctgagtttatacatctagtaagtagatgagtcaggatgtgaacccagatctcttgcttactagtaactttctctttttactgcatctaatataattttctttaccattcctcactgttgatacaattagggctttaaataaagcatataggctgggcagggtggctcacatctgtaatctgagcactttgggaggccaagctgggagaattgcttgaggccaagagttcaagactgccctggccaacatggcaagtcctcatctctaaaaaaaaagaaaagaaagaaagaaaaatagggccagccatggtggctcacacctgtaatcccaatgctttggaaggctgaggtgggcacatcacttgaggccaggcgtttgagaccagtctagccaacatggcgaaaccccatctctactaaaaatacaaaaatttacctgggcgtggtggcatacacctgtaatcacggctactcgggaggctgaggcatgagaatcacttgaacccgggaggtggaggttgcggtgagtggagatcataccactgcactccagcctgggcaacagagtgagactccatctcaaaaaaaaaagaaaagaaagaaaaagaaatgaataaataaagcatatgaacatctttgaatctacagccttcgtagagtacctgaaattttattcatttttacacttaatctacagatctttatggaacccctggtatatgataagcactgttctagatactggatatgcaaaagtaagccaaaacaaaagtccctatcttaatggggcttacattccagcaaggaaatacagacagtaaataatgagttatatgtgtatcagatggcgatagctgaaacaaagcaggcaggccagggtagcgaaagttttcaggaagcggggggtttcaatttgaatgagttggttagggaagccctctctactaaaatgacattaggcagaaacctgaataaggtgagggagtgagtcttgcaaatatatattgaattcttgctatgtgcgagacactagtctaggcactggagttatacctgtgaagaacacaggcatggtttttattctccaagaacttaagaaaatttgggatatgggaaggtgggataaataaagttatcttgcttcaaagtcacttgatacttttctatatacaaaaatgactttagggccaggcatggtggctcacgcctgtaatctcagcactttgggaggctgaggtcaggagttcaagaccagcctggccaacatggtgaaaccccatctctactaaaaatacaaaaattagccaggtgtggtggtgcacgcctgtaatcccagtactcaggaggctgaggcaggataatcgcttgaacccmcggggcagaggttgtggtgagccgagatcgcaccactgcactccagcctgggcaacagagcgagactctgtttcaaaaaaaaaaaaaaaatggtgggggagtgggggttgctggatgcagtggctcatgcctgtaatcccagcactttgggaggccaaggcaggagaatcacttgagctcaggaattcgagaccagagtgggcgtagcgagacctcatctctactaaaaatcaaaaaaattagctaggcatcatggcatgcacctgtaatcccagctacttgagaggctgaggtgggaggatcacytgagctgagatcaaagcttcagtgactatgattgtgccattatactgcaacctgggcaacagagcaagatcctktctcaaaaacaaaaaaacatggaaatagattgggaaattttgatatcagttgaaaaggcattccaaatgaagagactgaaggagaatggcagagaagcagtgtttcaagagataatggcagaacgttttccagaagtgaagaaaaatactaattgaagccctcttttaaaaagaaaaacaagcccgctactgtggcttgttttcccagcactttggtaggctggggtgggcagattgctcgagcccagcagttccagaccagcctgggcaatggggggaaaccacgtctctacaaaaaatagaaaaattagccaggtgtggtggcacatgcctatagtcctagttcctttggaggttgaggtgggaggatcacctgagcccagggagattgaggctgcaatgagctgtgatcacaccactgtgttccagcccaggtgacagagtgagaccctgtctcaaaaaaaaaaataaaaggaaaaacataaaaataaagtaatattttagatgagaagataggtctatcacattttagaagctaccaggcagtgctctgtttgaatgtcctaatgtaactggacccaggtttggctgcccggccacttgaaagcccgacacaagagatatgggttggtaggaggaaaagcaggtttgatcagaaagccaacaaaccgagaagatggtgaactagtgttctaaagtactatcttaaattctaaatgttaccatagtgtttttaaagggagacttggtgtgggagacatgcaggagtggtgagaatgcagggtctgtctgtctttgttctgatggctgtcttgcataattgcctgtcaggaggtatggttggtgttatcttgacttcagactgatggtgatggactaatcgttccagactccctctgagcaggaggattctgcagtctgggctccatgcctagtttgtttcaagattagcttctgtgatttctttttttccaacttttattttagattcaaggggtgcatgtgcaggtttgttacatgtcacaggagtttggtgtacagacaattttgtcacccaggtaatcagcacaatacccaataggtagtttttgaatcctcaccctcctctctgaaatttcttaagcaagaacataattaaataagcatgcattgccagaagggagggaaagaagaagaaagttggtgattaaaatatatttttaaaaccgagatccctggttacactaaggttagggaagtaaattaatgtgctttagatttcctaggaaactgaggcctaggcccaggtttacagctgtcccctcttcctttcctcttcagagagtacacactagatgtgtacagactctcctccgtggtcacacagcacgattccaagaaggctggagctgaggtggtaaagcaggtggagcaccctttgctgagtggcctcttataccccggactgcakgtacttaagggggatggagtggcccgatgaccttttctgctctggtttgatgacaggcatatcttattgcactttgctttactgcactacgcagatattgtgttttttacaaattgaaggtgtgtggcaaccctgtgtacagcaagtccaccagcaccatttttccaacagcatgtgctcacttcgtgtctctgtgctacattttggtaattctcacagtatttcaagctttttcattattatcatatctgcatggtgatatgcgatctgttacctttgatgttaaatattgtaattgttttggggcaccacaaactgtgcccgtataagacaacgaacttaataagtattgtgtgtgttctgactactctaccatccagccatttcctcactctcctggcctcctcatttcctaaaacacaacaatattgaaattaggctaattaataaccctacaatggcctctaagtgttgaaagggagagtcacacatagctcactttatttatttatttatttttgagacggaatctcgctgtgtcgcccaggctggagtgcagtggcgaaatctcggctcactgcaacctccgcctcccgggttcaagcaattctctgcctcagcctcccgagtagctgggattacaggcgcctgccaccatgcccggctgattttttttgtatttttagtagagatggggtttcaccatcttggccaggctggtcttgaactcttgacctcatgatccacccaccttggcctcccacagtgctgggattatagacgtgagctaccgtgcccggccgcacatctgtcactttaaatctacacctagaaatgattaagcttagtgaagaaggaatgtcaaaagcggaggcaggcggaaagctcggcctcttgcaccaaatagccaggttgtgaatccatagggaaagttcttgaaggaaattcaaagtgctactccagtgaacacctgaaaaatagaaacagacataagtttcacttatgctgatatagagaagattgtagtgctctggatagaagatgaaaccagccacaatgttaccttaatctaaagcctactctagagaaaggccctgtcttcagttttatgaaggctgagagattggttcatgacatttaaagggaaaaaagccatctccataacataaaagtgcaaggtggctctccctctctccctctctccctctctccctctccccctctccccctctccccctctccccctctccccctctcccctttccaccgtctccctctgatgccgagccgaggctggactgtactgccgccatcttggctcactgcaacctccctgcctgattctcctgcctcagcctgccgagtgcctgggattgcaggcgcgtgccgccacgcctgcaatttgtattttttggtggagacggggtttcgctgtgttggccgggctggtctccagctcctgaccgcgagtgatctacccgcctcggcgtcccgaggtgccgggattgcagacggagtctcgctcactcagtgctcaatgttgcccaggctggagtgcagtggcgtgatctcagctcgctacaacctccacctcccagccgcctgccttggcctcccaaagtgccgagattgcagcctctgcctggctgccaccccatctgggaagtgaggagcgtctctgcctggccgcccatcgtctgggatgtgaggagcccctctgcccggccgcccagtcttggaagtgaggagcgcatcttcccggccgccatcacgtctgggaagtgaggagcgtctctgcccggctgcccatcgtctcagatgtggggagcacctctgccccgccgccccgtctgggatgtgaggagcgcctctgtccggccgcgacccggtctgggaactgaggagtgtctctgcccgaccgmcaccccgtctgggaggtgaggagcgtctttgcccagccgccccgtctgagaagtgaggagcccctccgcctggcagccgccccgtctgggaagtgaggagcgtctccgcccggcagccgccccgtccgggaggtggggggcagccsccgcccggccagccgccctgtccaggagggaggtggggggcarcccccgcccggccagccaccccgtccgggagggaggttgggggtgcctctgaccggccgccccgtctgggaagtgaggagcccctctgcccggcggccaccccgtctgggaggagtacccaacagctcgttgagaacgggccatgatgacgatggcggttttgtcgaatagaaaagggggaaatgtggggaaaagaaagagagatcagattgttactgtgtctgtgtggaaagaggtagacatgggagactccattttgttctgtactaagaaaaattcttctgccttgggatgctgttaatctataaccttacccccaaccccgtgctctctgaaacatgtgctgtgtccactcagggttaaatggataaagggcggtgcaagatgtgctttgttaaacagatgcttgaaggcagcatgctcgttaagagtcatcaccactccctaatctcaagtacccagggacacaaacactgcggaaggccgcagggtcctctgcctaggaaaaccagagacccttgttcacatgtttatctgctgaccttccctccactattgtcctatgaccctgccaaatccccctctccgagaaacacccaagaatgatcaataaatactattaaaaaaaaaaagtgcaaggtgaagcagcaagccctgatgtagaagttgcagcaagttacccagaagatctagctaagatcattgatgaaggtggctacactcaacaatggattttcaaggtagatgaaatagccttttttcggaagaagatgccatctcrgactttcgtagctagagagaagttgattcctggcttcaaatcttcaaaggacaggctgactctcttgttaggagctaatgcagctggtgacttgaagttgaagccaatgctcatttacattccaaaaatcctagtgcctttaagaattatgctaaataggccgggcatggtggctcatgcctgtaatcccagcactttgggakgccgaggtgagcaaatcacttgaggccaggagttcgagaccagcctgaccaacatggtgaaacccggtctctactaaaactacaaaaaaaaaaaaaaaaagaagaattaggccaggcatgatggctcacacctgtaactcagcactttgggaggccgaggcaggcagatcacgaggtcaggagttcgagaccagcctggccatcatagtaaaaccccgtctctactaaaaatattaattagccgggcatggtggtgcgcaactgtagtcccagctactcaggaggctgaggcaggacagtcgcttgaacccgggaggtggagattgcagtaagccgagatcgcaccattgcactccagcccgggcaacaatgcaagactctgtctcaaaaaaaaaaaaaaaaaaaaaatagccaggcgttgtggcgcgcatctgtaaccccagctactcggaaggctgaggcaggagaatcacttatacccaggaggcagagattgcagtgaggtgagatcacaccactgcactccagcctgggtaacagagtgagactccatctcaaaaaagaattatgctaagtctactctgcctgagctctataaatggaacaacaaagcctggatagtagcacgtctgttaacagtatgatttactgagcattttaagcccacttttgagacctactcctcaaaaagaaagattcttttcaaaacattactgctcattgacagtgcacctgatcacctaagagctctgatggagagcttctgtagagcttgagatgttcaggagttgaatgttattttcatgcctgctaacacaacatccattctatagcccrtggatcaaggagtgatttcaactttcaagtcctactatttaagaaatatatttcaaaaggctatagctgccatagatagtgactcctccgatggatctgggcaaagtaaactgaaaacctctgaaaaggatccagcattctcggtgttattaagaatattcgtgattcatgggaggaagtaaaaatatccatattaacagaagtttggaagaagtggatggtaactgtcatgggtgactttgaggggttcaagacttcagtgagggaagtcactgtagatggggtagaaataacaagagaacaggccgggcgcggtggctcacgcctgtcatcccagcactttgggaggccgaggcggacggatcacgaggtcaggagatcgagaccatccgggctaaaacggtgaaaccccgtctctactaaaaatacaaaaaattagccgggcgtagtggcgggcgcctgtagtcccagctacttgggaggctgaggcaggagaatggcgtgaacccgggaggcggagcttgcagtgagccgagatcccgccactgcactccagcctgggcgacagagcgagactccgtctcaaaaaaaaaaaaaaaaaaaaaaagaaataacaagagaactacaattaggagtggagcctgaagatgtgactgaattgctgcaatctcatgataaattttgaacagatgaggaattgcttcttatggatgagcaaagaaagtggtttcttgaaatggaaactactggtgaggattctgtgaacgttgttgaaatggcaacaaaagattttgaatattacataaacttcgttgataaagcagcagcagggtctgagaggatggactccaatattgaaagaagttctgctgtkgacagaatgctatcaaacagcatcacctgcaccagataaatctttcgtgaaagggagagtcaattgatgtggcaaacttcattgttgtcttattttaggkaattgccacagccactgcagccttcagcaaccaccaccctgatcagtcagcagccatcagacatggaggcaagaccctccaccagcaagaagattatgacttgctgaaggctcagatgatcgttagcatttttagccataccttaaccaaattaaagtatgtacgttgtttttgtagatgtaacgctattacacactttaaatagactacggtatagtgtaaccacaacttttatatgcaccgagaaacaaaaaaatccaagtgagtcactttattgtggttgtctggaactgaacccacagtatcgctgaggtatgcctgtactgtacacaaacctctctcctggcaccagttaaatatatgcattttctattccttctccaacctataggccttcctgtgtgtctctcgtcttccttccccgcttcctgggaagctcttttacttcttccattataattccttctctacctgtctgtcctttaagacattgttcatctcatacatctttatattaatcataatcctttttatcataatcttaataaaggaaataaacttcagagcgatatgtgaaaataaatttgagcatgatcctattttctgttaaaacaaatacatgttttaacagaaacatccttctgtttcctttgtgtgcacatatatttgtacgagcaaggagaagggtagaaaaatacaaaccaggcgggtgcagtggcttacgcctgtaatcccagcactttgggaggccaaaacgggcagatcacgaggtcaggaaatcgagaccatcctggctaacatggtgaaaccccatctctactaaaaatacaaaaaattagccaggtgtggtgacgggcgcctgtagacccagctacacaggaggctgaggcaggagaatggcatgaacctaggaggcggagctcgcaccactgcactccagcctgggtgacagacagtgcaagactccatctccaaaaaaaaaaagaaaagtacaaaccaagctgttgatactgtttaccttgtgaaggcaggatgaaaatatggatagacttcactttttctttgtatatctgtataattttttttaattaaattttttgtagagacagggtctcactatgttgtctaggctggtcttgaactcctggcctcaagtgatcctcctgccttagtctcccaaagtgctgaaattgcaggcgtaagccaacacgtctagccctttataatgcttgatatgagaaaataaaattttcccttgtcacctcaaagagatattttccaaggttaaacctggagctgggcgcagtggctggcacctgtaatcccaacactttgggagaccaagacaggcagatcacttgaggttgggagttcaagaccagcctgaccaacatggtgaaaccccatctctgccaaataatacaaaaattagccaggtgtggtggcatgcccctgtagtcccagctacttgtgaggctgaggtgggagaatcgcttgaacgcaggaggtggaggttgcagtgagcygagatcatgccactgccctccagcctgggtgacagagtgagaccctatcttaaaaaaagaaaacccggagacatgctagttctgcactgttggctgggcgccatggtttatgcctataatcccaagtccaaggcaggaggatcgcttgaggccaggagttcaagaccagcctaggcaacgtagcaagactccatctctgttttattctgtgtgtgtgagactccatctctaaaaaaaaagaaagaaagaaaaaactaggtctgtactgtctaatgtggtagcctctagtcctagtcatatgtggctattaaataaaatggaaatttttgttctctagtcacattggctatatatcaagttcttggttagctactatattggacagcacagacatataatatattcatcaccacagaagattctgttggataatgctgttctagactgttcctgcttgttcagccttctcttcctcttcccttcagccaattatgcactaaatcttatcgattctacttttttaaaatgtcttaaattcattcttgctctgcgtcctcattgtcttttgtccatcgatatttctcacttagactttcacaatagcctttgaggcattcactttgtctccaacccatgagtctccagtctctgccctgccctgttactgttgagatcttcctacagtgctggtcatatttctcctctccttaaaacctttcattggccaagataacactaggcaccctagcatgacatttcatggtctttacctacttttctaacctcatcagtcactacttcccacctcccttgaagttcgtacttttgcagactgaatcactcaaaatttccctaaacacttcacacctctgtgccttctcacattctatttcctctgcatggtgaaaaacatctatatgttgttcaaaaccaagcttagcccacaatctgattctaggaagacttctccacacccatcttactaaatagagataatttcttcttttatgtcaacactgttccttatatgaacatctgggttaacccttagcacgctgagttgaaatgatctgtttacatgtctctccccagctggataattgggcttcttgaagggagagtctgggtctgatttatctcaccatccacggagctggcagcaggcctggcatgtcataagtgacagtcactgttttatttatttattttaatttaattttattttttgagacagggcttcactctgtctcccaggctcgggtgcagtggcacgatcatggctcaccgcagccacgacctctctgggcttaggtgatcctcctacctcagcctcctgagtagctgggactatagatgcgcaccatcacacttggctaatttctttttgtttgtttgtttgttttttatttttggagagacacccgggctcaagtgatctttccacctcagcctcccaaagtgctgggattacaggcgtgagccatcgcacccagacagtcactgttttctagttcagtcttacctttttcccgaattctcacaggacttctttatgctacttatatttcatttgtcacaggccaccttattcagtagaatacctttggcatgactatggtttgttttcttcttctctccctccctgcaggattctgcatatcctgagggcagagactactcttatttttttatcccatgacatccacatagagtaatgttcaccgcaaacactcagcaactgtctttgcagcttttgaggccaagagggaagctgactgctgtttattttcttcttggctttaccttctgaaaaatctagtaatttcctaaagtttctgatttctcagacccatatagaagaaataaagtagatgtttaggctgggcatggtggctctcgcctgtaatcccagcactttgggaggccaaggtgggtggccaaggtgagctcaggattttaaggccagcctgggcaacatggcaaaacgttgtctctactaaaaatacaaaaaattagccgggcgtggtggtgcatgtctgtaatcccaactactcgggaggctgaggcaggagactcacttgaacctgagaggcagaggtggcagtgagccgagatcacgccacagcactccagcctgggcgacagagcgagactctgtctcaaaaaaataaagtagatgtttatgttcatgtgtttctttccacaggctttggatgaagagtatttaaaagtagatgcccaatttggaggcattgatcagagaaagattttcacctttgcagagaaggtgagtgtctgctttcctgtcttttttcacttgcacctcagaggtatgcagctgtgtttattgaactatgatgtgtcagtcccactagtcatagtgtatggtaaatattctccttgttttgcagatgagaacactgaggatagaagataagaagttgtccaatatcacacagttagtaactgagcaggaattattagtacccagatctttcaaactccagagcccatgtgcctggtgacaaccaggaagctgctcccgcacctgttggatttactcctttcctaatagcccagtttccaaggagaggcattaccarttggaactactgtcctttcacagagcatttggttcgcatttcccagcatctttttctttttcttgtcttttttttgagacaagttctcactctgtcgcccaggccagagtgcagtaatgcggtcatggctcatcacagcctcgacagcctgggctcaagcagttctcccacctcagcctcccaagtagctgggaccacaggtgcatgccacaacacccgggtagttttaaaattacttgtagggatgaggcctccctgtgttgcccaggcaggtctcaaacccctgggctcaagcagtcttcctgccttggcctcccaaagtgctgggattataggtgagatccactgtgcctggcttagttttttgatatagttaatgaatacagaaatgcttactatatatatatatatatatatatatatatatatatatatatatatatatattttttttttttttttttttttttttttttttgagactgagtttcgctattgtcacccaggctggagtgcaatggctcactctcggctcactgcaacctccacctcccgggttcaagcgattctcctgcctcagcctgccgagtagctgggattacaggtgcctgccaccatgcctaggtaatttttatatttttaagtagagatggggtttcaccatgttggccaggctggttttgaactcctgacctcaggtgatccacccatctcagccttccaaagcactgggattacaggtgtgagccactgcacccagccacaatataaattttttgagggccaggcactgtggctcatgcctgtaatcctagcacgttgggaggctgaggcaggaggatcatttgagcccaggagtttgagaccagcctgggccacatagcaagactctgtctccacaataaaataaaaaattagccaggcacgcctctgtagtcccagctattcaggaggccgaggcagaataattgcttgagcccaggaggtgtgatcctggctgcagtgagccatgatcacaccatcacactccaaactgggtgacaaagcaagaccttgtctctgaaaaaaaaaacaaaaaagaaaaaaataaatacattttttgattatttcttattatttgttttttgttgttttttgtttgttttttaaagacagagtctcacactgttgcctgggctggagtgcagtggcgcgatctcggctcactgcaacctctgtttcccaggttcaagtgactctctttgcctcagcctcccaagtagctgggattacaggtgcctgccaccacacccggctaatttttttgtatttttagtagagacggagtttcactatgttggccaggctgatctcgaactcctgacctcatgatccacccatctcagcctgtcaaagtactgggattacaagcatgagccactgcacctggcctattatttcattgtatctgcttgattaactttttagttggacctccttttattattaaagcagggatttggcccataccttgtttttgtatgactcatgagctaagaatggtttttacattgtttaaggattgtgaaaaaagatgaagaataagcagtaaagagcatatgtggcccataaagcctaaaatctttttwttttttttttgagagggagtctcgctttgtcacccatgctggagtgcagtggcacaatcttggctcactgcaacctctgcctcttgggttccagcaattctcctgcctcagcctcccaagtagctgggactacaggcgygtgccaccacacccagctaatttttgtatttttagtagagacagggtttcaccatgttggccaggaatggtcttgatctcttgacctcatgatctgcccgccttggcctcccatagtgctaggattacagacgtgagccactgcacccagcccctaaaatctttattaactggccctttctaaaacagtttgcccatccctgccctagagattacaacacatatccttgcaatttattacagtttaagttagatatttttaccactgcccaacaatgcaagaaacagttttactacatttttcctccaacaacagttggagtaaaactcattttttgtttgtttgttttttgttttttgagatggagtcttgctctgtcgcccaggctggagtgcaatagcgccatctcggctcactgcaacctccacctcccgggttcacgccattctcctgcctcagcttcccaagtagctgggactacaggcgcccgccaccacaccctgctaattttttgtatttttartagagacggggtttcaccgtgttagccaaggtggtctcggtctcctgacctcatgatcctccgaccttggcctcccagagtgctgagattacaagcgtgagccacygcgcctggcaaaactcatcttttttttttttttttttttttttttgagacagagtcttgctctgtcaccaggctggagtgcagtggcgtgatcttggctcactgcaacctccgcctcccgggttcaagccattctcctgcctcagccttccgagtagctgggattacaggctcccaaccatgtccagctaatttttgtatttttagtagagatggggtttcaccatgttggccaggttggtctccatctcctgacctcgtaacccacctgcctcggcctcccaaagtgctgggattacaggcatgagtcaccgcacccagcctcaaaactcatttttgacataaattttaaatcccttggctgggcgcaatgggtcactcctgtaatcccagcactttgggaggccaagacaggcagatcacctgaggtcagaagcttgagaccagcctggccaacatgatgaaaccccgtctctagtaaaaatacaaaaattagccagacgcagtggtgtgcacctataatcccagctattcaagaggctgacacaggagaattgtttgagcctgggaggcagagattgcagtaaactgagatcgcaccattgcactccaggctgggcaacagagagagaccttgtctcaaaaataaaataaaataaatcttaaagactttactaccattttttttttaatttttctgagactgagtctccctctatcacccaggctgaagggcagcggcatgatctcggctcactgcaacatccgtctccctggttcaagggattctcgtgccccagcctactgagtagctgggattacaggtgcccgccaccacgcccggctaatttttgtatttttagtagagatggggtttcaccatgttggccaggctggtcttgaactcctgacctcaagctgtccacccaccttggcctcccaaagttctgggattacaggcgtaagccactgcgcccagcctgtaattgttttttaagtcacttttcatctatatctacccctacttcccctttctgatactcttgattcttgtctgcagttctttgcttctgtgtgagttcattttccttcaacctaaagagcccccacttagtatgtgtttgtagtgcagttctttcagtaatgagttctttcagctttcttttatctgaaaacatctttcaatttctttcactgggtatgaaattggaagtttgcaattatttttcttttggcacttttaaaggatcattgcattgccttctggcttccatagtttcgactgaaaagtcacctctaagtttattgtttctcctttacagataatatgtcttttctctgcttttaagattttttcttgtttctgattttcagcaattttactatgatgtttttgttgttgttttctttgagacagggtcttgcttgcattgcccaggctggagtgattgatcttggctcactgcagccttgacttcctgggctcagatgatcctcccacctcagcctcccaagtagctgggactatgggcatgtgccaccacacctggctaatttttgtatttttttttggagatggaatttcaccatgttggccaagctagtctcaaactcctgagctcaaacgctttgcctgccttggcctcccaaattgctaggattacaggtgtgaactgctgtgcctgaccagctatgatgttttcagctatagttttctttgtatttatcctgcttagattttgctgagcttcttgaatcagtggatttgttttcatcaaatttgggaaattgtctgccatgatttcctcaaatactgcttctctcttattctctttctcctctagggactttataaaactcatgtctcatattctgttctgctgttttcctttctttgttccctctgtgctttactttggatatgttctattgaactttcttcaagtttatcaatcgtgtcttctgttaaatccagtattgtattgtgacattttagaacttccatttgattctttttatagattccaattgtcttttacaattctctttcatccattttgtctgccttttcttatttcctttttggtttgtttttcctgcctattctgcctatgtactcttattttcttttatttatttatttatttatttttatttttatttttttttgagatggagtctcgctttgtcacccaggctagagtgcagtggcgcaatctcagctcactgcaagctccgcctcctgggttcatgccattctcctgcctcagcctcccgagtaactgggactacaggcacccaccaccacgcccagctaattttttatatttttagtagagacggggtttcaccgtgttagccaggatggtctcgatctcctgacgcctgcctcggcctcccaaagtgctgggattacaggcatgagccaccatgccctgcttattttctttaacctaccaatcacagttattttggcatcatggtctatttattgcaatatctggattgtttctgaatctgcttctattggctattttaactgtcagccacttttctctgcttcccatttctagtatttttttgtatgtgtgtatcaaagggattatagatgcattgtagaccctccggattgtgtttgtaggatgctatgttttctgtagattgctaaattactgacttatcacctgggttctgtcaggggttggttttaggctttgttagaacgtctacytcagcttagcctttactcctgtggtgtggtccttgttcctagagcatggcctttctagagactcaaactgaaatatcatggtgttcacaaagccttctctactttgattggagctaaacttccatctctgtctccccaatactgtgcagcctccaaaatctctgcccaggtctccagcctcccagaacctgttctctgccagacttcctggtatctcactatgtgcatacacagctatgagtcagccaagaaatcagtggggaattttgacataggctgaggaacccatcccaatccctagcctcctccagccctgaactccaatagctgtttcctctgcytagtctttcgctgtctgcttggtstctttttatcagcacctggtttgcaaagaaataccctcagtgagaaagcccaaggcaagtgtggtcaccttacttcccttcgctcaagatttgctgccctgttgggttttgttttgttttttgtttgttttgtttttgtttttgttttttgagatggagtctcgctcttgtcgcccaggctggagtgcaatggcacgatcttggctcactgcaacctccgcctcccgggttcaagtgatcctactgcctcagcctcccgagtagctgggattacaggtgcctgccaccacgcttggctaatttttgtattcttagtagagatggggtttcaccatgttggccaggctcatcttgaactcctaaccttaggtgatccacccacctcagcctcccaaagtgctgggattacaggtgtgagccaccatgcccggcttgccctgttgttttatgtatttccagcttttattgttgtttatggtgacataagtccaatagcctcacaatgtaatactgatagaaaagcagtagggaaaaaaacttcgcttgaattacagtcactgtcaaagctacatatttagtataaaaagattggaagcaatataacaactactcagttgctggccaagtcagatgagatcagggcactgaggaggaacttagactaatatckgcttttgtgtgtttctctaatctctcagtacctccctgcacttggctattcaaaacgggtccatctgatgaatcctatggttccaggattaacaggcagcaaaatgagctcttcagaagaggtaagttgccagctgagacttgaatttagaaatcttcagcctcaatggagagattgaggactgaaaagaacagtgacctggctaactagaattctccaatatttgagttagaaggagscttacaccattcaattagtttagtggttcttgagtatcaaaggatccagagcagtcctgatgagatctaatcataacttaatggtttttgctgctgataaaaaaataaaagcaaaagtaatgtctttgttcatacgactgtgatgaaattcagccttattaatgagagcactatggttgcatttcactaattagcattttgattcctagggtaatacttgatatcactaatattatgatatcttttaatatttaagagtccctcttgagctcgtgtacttgagggaaagttcactttggttctgatcattagaacgtggaaatccaaagatgtgaaaggttgagttytgggttcccaaacatggcttaccttcagaatcatytagggaatttaaaaaaaaaaaaaaaagtgttgattagaccttgtccatagagattctgataaagtagttctgggaggaacttaggaatctgtatttccttccttccttccctttctctctcccttttttttttttttttttttttttgagatggagtctcactctgtcacccaggctgcagtgcagtggtgcgatctcagctcactgcaagctccgcctcccaggttcatgccattctcctgcctcagcctcccagagtagctgggactacaggcgcccgccaccatgcctggctaattttattttgtatttttttagtagagatggggtttcactgtattagccaggatggtctcgatctcctgacctcgtgatccacccacctcaggnnnnnnnnnnnnnnnnnnnnnnnnnnnnnnnnnnnnnnnnnnnnnnnnnnnnnnnnnnnnnnnnnnnnnnnnnnnnnnnnnnnnnnnnnnnnnnnnnnnnnnnnnnnnnnnnnnnnnnnnnnnnnnnnnnnnnnnnnnnnnnnnnnnnnnnnnnnnnnnnnnnnnnnnnnnnnnnnnnnnnnnnnnnngaacccaggaggcagaggttgcagtgagccaagatcacactgttgcactccagcctgggcaacaagagcgagactccctctcaaaaaaaaaagggccaggcacagtggctcacacctgtaatcccagcactttgggaggccaaggcgggtggatcacctgaggtcaggagttccagaccagcctggccaacatggtgaaaccccttctctactaaatatataaaaattcagctgggtgtggtggcatgcacctgtaatcccagctactcgggaggctgagacaggagaattgcttgaacccaggagaaagaggttgcactgagtcaagattgcatcactgcactccagcctgggccacagagtgagactccgtcttaaaaaaaaaaaaaaaaaatgcctggcccaatcccaagagattttgattcattaggtttgggtggaacccagtaaaaggtgattcatatactgtcacatgtgagctagaatttggtaaccactgaactcaaawgaccatgaactcactctttccaaataagaaacaaagcctattacctaaaaaggaaaaatggctgtagataatatataatacttagtgtggctgattgctgtgaacaagtatcctcacacattgtygacagcaatgttgattaggatacctttcaaaaaacaattttgaacctagcaattttcggcatcttaaggaaatgattctagagaagggaaaagactgcaaagatgtccaatgtagcattatatataatttgtaaaaattaggatagaatctaacagtttggagtttgctaaattatgtttccrctaataattgggaatataatatggcataaaaactataagtaggccacacattgtggttcacacctgtaatcctagcactttgggaagccaaggtgggcagataggttgagtccaggagttcaagaccagccttggcaacatgataaaatcccatctctataaaaaattttaaaaattagctaggcatggtggcatgcaccaatagttccagctacatgggaggctgaggtaggaggactacttgagcctgggaggcaaaggtcgcagtgggccatgattgtgccaccacactccagccagggcaacagagcaagcaagatcctatcaatcccaacactttgggaagctgaggcaggaggattgctagaggccaggagtttgagattgtcctgggcaacacagtgagaccccattttaacaaataattagccaggcatgccaggtgcggtggctcacgcctgtaatcccagcactttgggaggccaaggcgggtgaatcacctaaggtcgggagttcgacaccagcctgaccaacatggagaaaccccgtctctactaaaaatacaaaattagctgggcttggtggtgcatgcctgtaatcccagctacttgggaggctgaggcaggaggaaccgcttgaacccaggaggcggaggttgaggtgagtcgagatcatgccattgtactccagcctgggcaacaaaagcaaaactgtctcaaaaaataaataaataaataaataaataaaaattagccaggcatggttttgtacacctgtagtcctaactcctcttgaggctgaggtcagaagatcacttaatggcaggagttcgaggttacagtgaactataattgcaccactgtactccatcctgagcaacagagcgagaccrtctgaaaagaaaaaaaattgtaagtaaggaccaggtagccactcagaaatacttaaaagatagacatttattctccaactacaaattcataacaattttgtgtgctataamcaaagcctgagaagaatataaaaaataaaatagtttaatttgttagatggcaggattgtgagtggtttttcactgtcgcccaggctggagtgtagtggcatgatcatgcctcactgcactttcaacctcaggctcaagtgatcctcctgcctcagcctcctgagtagctgggaccacaggcgcgtacaaccacacccagctaattttttattttcagtagagatgaggtttttctatgttgcccacactggtcttgaactcctgggctcaagcgactctccagcctcccaaagtgataagactacaggtgtgagccactgtgcccagccaaatgttaaaatatttttattgcccgggtgcagtggctcacacctgtaatcccagcactttgagaggccaaggcggggcaratcacgaggtcaggagatcgagaccatcctggctaccacggtgaaaccctgtctctactaaaaatacaaaaacaaaattagctgggcgtggtgacaggcacctgtaatcccagctattcgggaggctgaggcgggagaatggcgtgaacccaggaggcggagcttccagtgagctcagatgrcgccactgcactccagcctgggcracagagtgagactccgtctcaaaaaaaaaaaaaaatctttatttatttatttttaccacatccacaggaaaatatctgcaagtacctaatgttaaaatctttgtaaaaagaatttttttagcgaggcacagtggctcacacctttaatcccagcactttttgggaggccaaggcaggagagttgcttgagcccagaagtttgagaccagcctgggccacatgatgaaaccctgtctctacaaaaaatagaattacctgggcrtggtgacacattcctgtagtcccagctttccaggaggctgagatgggagaatctcttgagcccaggaggctgaggctgcagtgagccatgattgtgccactgcactccagcctgggtgacagagaagaaaaaacaaaatttaacttatattagttgagcatattctcattttcaaccacaagaggtcctcttccgttctatgacttctaggagtccaagattgatctccttgatcggaaggaggatgtgaagaaaaaactgaagaaggccttctgtgagccaggaaatgtggagaacaatggggttctgtccttcatcaagcatgtcctttttccccttaagtccggtaacactctctgttttcttcctagaggccaggctagaatagaaaagttcgtgctgtgatcatacttgtgatttgtcacagactcttccttcagggactggctgccctgattctctgctctgatttcttatatattaaagtatgaatgatgttgggatgtaatttaattgtccatatattcgttaccaggctaggttctgagggaatactggagtgggcagaggtgttagaagtaagggtgggggcagacatgttgaactagaggaatacaacaaaatagatataagccacaagccttcccctgaagcagctgagatgctagctgggtatacaatagtgccactcatccaatttaagaataataccatacaataaagttcagaatatatggcaaaaactacaaatagtcatgcatgtgggctaggaatagtcatgcatgtgagctaggaatgctgtcaatgagtttgttgacatggatccttttccttatagagtttgtgatcctacgagatgagaaatggggtggaaacaaaacctacacagcttacgtggacctggaaaaggactttgctgctgaggtaacatgaaaggaaaaggaatcctttcatgaagatctgtattttgttattttttgctgactgttagaacttgtttagaacaacttgttctgtgtaaaagtgagctgcctgctatttttgctctacttttggtaatctcactagtgtccattttccttcaaaattgcagttttggttaaagtttcttgtcagttagcttttctgacttaggaattttgttaatrcagatggatttctatccctyggggccctttccttacctggcagggactctgtctcacctcttctcaggaaacatttcttatcagtaaatgtctgtaatcttatacacacgagtggtccctttaggatgtacaaaagcagtactcattcagtagaaaccatacttcttcaagtacccatacaaccattctgtttttcactttctgtattcaataaattacatgagatactaaaaaaaaaaaraaaaaagaaaatgggctgggtgcagcagctcacacctgtaatcccagcactttgggaggccgaggtgggtggatcacctgaggtcaggagttcgagaccagcctgaccaacacggagaaaccccatctctattaaaaatacaaaaaagtagccaggcatggtggcacgcacctgtaatcccagctactcgggaggctgaggcaggggattcgcttgaacctgggagtcggaggttgcagtgaaccgagatcgcgccattgtactccagcctgggcaacaagagtgaaactccgtctcaaaaagaaaaaaagaaaggaaaagaaaagaaaaagaaagataatccccactcaactctgccagacctctccatcttggcccgctaggtttgtagttatatgctacagggctctgtgtttttgtggggttttttttttttgagacagagtctcactctgtcgcctaggctggagtgcagtggcacgatctcggctcactgcaacctccgcctcccaggttcaagcgattctcctgcctcagcctcctgagtagccgggattacaggtgcccaccaccacacccggctaattttcatattttttagtagagacggggtttcaccatgttggccaggctggtcttgaactcctgacctcaggtgatccgcctgcctcggcctcccagagtgctgggattacaggcgtgagcccctgtgcccggccagggctctgtttatgctctccagggctgcatattttgttaatggctttgatgaggattcaggtggttcccagattcgataggcaaatggtacaawgctaatatactggtgctttaatcactctccaaatgacttagcaggctggaataaaggacctaactcagcaaaaatgaagtatttcaggaacagatgcaaaatcaggattcaaaaacaagagataattataaaaggacagaatagaggctcctattcatttcaacagacacttgaacaaaagacttactaggtgcccatgtgttaggcactatgctagggactggtattacacagagggttcagtcctcctaatgctcagtccagtaggcgaggcagacttgtaaacatttcattggctgcattttacatatatatctatatgtgttttttaacatatgtgtgtatgtgtgtatatatgtgaatatatgtgtgaaaatatatatgtgaatatatataatgaaaagaatatatatataccagaaataatataggaggaaatgattaactgactctagaaaagcttgtggaggagacactatccaagcactattttgcttgaggaataggagttcacaaggaaatctgtgagggaataagttgtacaaagacatggtaggatgaagcagcatgatgtatgaggaattccaggtggtttggtctgactagagtctaaaaggtgaggagggggattatgggagagataggcagggccaggtcacaaagggaagatgtgataatmccatatataggaataaaatggggggttttgtgattgactctgaattcaggtccaaccaatttaatggagctgctagaaatgttaatgtacgccaggtgcggtggctcacacctgtaatcccagcactttgggaggccaaggcaggagaattgcttgagctcaggagttgaagactagcctaggcaacatagtgagactctgtctctacaaaaaaaaaaaaaaaatcaaaatactggccagccatgatggcgcatgcctgtagtcgcagctactgggaaggctgaggtgggaggatcgcttgagcccaggagatcaaagctgcactgagccatgattgcgccactgtactccagctgggtaacagagcgagaccatgtctcaaaaaaaaaaaaaaagtcttttgtgggaattaggaatagatgaaattcctcagaaaaaaggtctgcagccatgttatccaacagtactttctgtggtgatggatatgtcctatctgtactgcctgatacagaagccacatgtggctgttgagcacttgcaatgtggcaggtgcagttgaagaactgaatttcagtttacatttaaatacccacacaaggctagtagccaccatattggacagcagcagccctagagcttttattaaaattaaatattcccaaggaaatgaagaagtagtatcagaaacaaaaatgttcgctttgttgtattaaaagtgttcattcctaagggatgtcccctcagaatatctagaagattctttcagaccagatttgagatataaaaaaggcagtcagctgggcgtggtggctcacacctgtaatcccagcactttgggaggctgaggcaggtggatcacgaggtcaggagttcaagaccagtctgggcaacatggtgaaaccccgtctctactaaaatacaaaaaattagctgggcgtggctgcatgcgcctgtagtcccagctactcaggaggctgaggcaggagaattgcttgagcycaggaggcagaggttgcaatgagctgagattgcgccactgcaccccagcctgggcgacggagcaagactccgtctcaaagaaaaggcagtcacaggacacaaggaataaaatggaattactgaactattaccatgtacgagcagcgttctcatcattttcacacccacattcagtgatttaaccctcatccccatcctgtgagatatagctgttgttagcttcactttataagtaacaaagccaacactggcccggcacgttggcccatgcctgtaatcctagcactttgggaggcagaagcaggcagattgcctgaacccaggagttcaagaccagcctgggtaacatagcaagaccctgtctctacaaaaagaaaagagaaaaagcagcagccaaagcttagaggggttatgtgcctagtttggagtcgcacacagctagctgggaatctaatctgggtctgtcgaactccaaagcccttcctctttcttcttactcagctgtctccctcaggttatctttaggccttgggttacctatgtgaatgtttctctgcttgtaaataccagttggtctgtgaccctactctaagcataaatggagggactagaagaattagactaacaaatacattcagctcctaaacaccctcaagttagtatagatttcagaatcaaaagacttggattttggacacgttagtctttctgaatgtattttcccttctcctacctgcctcacaagattatcacaaggatcaaataagactgttgggaaaaactcccttgatcctacttttttggattcaggtgtcctgtgccctgttctagactttatctcactaggtcttgttcgattctgcaggttgtacatcctggagacctgaagaattctgttgaagtcgcactgaacaagttgctggatccaatccgggaaaagtttaatacccctgccctgaaaaaactggccagcgctgcctacccagatccctyaaagcagagtaaggccagctggagaggggccgacatcatcaggagagagagcttgtcaatgagccttgraaaaatgcctgtcttaaattgagggcacaacaacccagggggtctgaagtgcaggaatgtcatgtcctactggctcctagaatggaacttgagtcattttgatttgggtttggttaacatcaggaagtgatcacatccttttgtacmggcattgctgagagctgctggtgtaagatgtatactttggtccttctagtctgtttgttaaatctgcctcttcattaaagatagtgaccggggccagacacagtggctcacacctgtaatcttaacactttggaaggctgaggcaggcggatcacttgagcccaaaagttagagaccaaaacccagtctctacccaaaaaaaaaaaaaaaaaaaattagccaggcatagtagcacatgcctgtagtcccagctacttgggaggctgaggtgagaggatcacctgagcatggggaagttgagactgcagtgagccatgatcgcaccactgcactccagcctgggcaacagagtgagactctatgtctcaaaaaaagaaaaatgatagaaattagattagacctattatacccaaccggtatatagggtatcgatagtttcttacacagctgttgggcagagcctgcagagcttagagaagcttatctttagattctcccagtttccttctatgtgcatgggcctggctcttagttggccatccacttgtgcgtaatgctaagatattggcattgatagctttgtgcgacccttccagaaaaaaactcagtaactcagtaaaattttttttttttttttctaaaagagacagagtctggctctgttgcccagcctggtcttgaagtcctgggcttaagcaatcctcccgtctcagcctcccaaagtgctagaattacaggtgtgagctaccacacctggccaagactcagtaaattctatgtggaatgcatgaatggaaatacctaaaggaggcaaagctactactgctccctccccgctagtctaataattgagggagagaacagatgaaaatcaggtatgtcatgtctgaaaggttgccaacccagtattaaagaagttacaactcagtgtttagactctggggattctacactaaatcttacctaatctcagtgtcttaacgtggtgggatcagcagctgacctgccacagggaagaattctacctcatggggttcttctcattcccagagccaatggccaaaggccctgccaagaattcagaaccagwggaggtcatcccatcccggctggatatccgtgtggggaaaatcatcactgtggagaaggtactcatttttcaccacatctcagagaggcagattggggtcaggtttgtctgtttccatccggaggaaacgtggcctggagatgggaagtaacatcctgaggtcatattgcaagtcagagtgcaggtgtctaattccaggcatcaggctttctgttgcgattgttgcctgtggatattatgcaaccaaacacagccaggaactcagcrtgggggacggatgttagtcagagggaacttgtttatctgttaaatctggtctgatagactcacctgatccctatcggcttgcctggactagctacaggccttatcttggatgggccactttgcccccttcagaaagtggtggagggaagacttcctttttcccagagacagaaggttatgcacccagtggcctgggaccattgttctgggctttttttcccttcgacatggatttgcttctcactgtgtaccccaaccaccawaaccaccctgagatcaatgctggtgctcctgcatcagatggcttagagatccttccacctcttaacacaagcatctaggtccactttactcaaatctggcctcagttgagagcagagtataccatcagagcccattctcctgtctgctgtctgggacgtggaaagaaagttagctctagggggtctttccaggggcctctgtaaggagtggatgctcctttccggaatccaagagttcaccaggctgcttctctaatggacgatgatcctcttcctcctgacgtctctccctggcagcacccagatgcagacagcctgtatgtagagaagattgacgtgggggaagctgaaccacggactgtggtgagcggcctsgtacagttcgtgcccaaggaggaactgcaggacaggctggtagtggtgctgtgcaacctgaaaccccagaagatgagaggagtcgagtcccaaggcatgcttctgtgtgcttctatgtgagtgaggacttggagtggggcacaggacctggggaggccaggaagagtagggaatcagcccatatgatgtccttccacacaccaggtggaagctctgagaacacgtgcctcttccttgctgatgccaaaagttgatgcatgaaggacttatcgtacaagtactgttaatgaagcattttacctacagttaattttgttaaaatagaaatggagggctcaaaccagtacatacccaagtcttactactagtaaggagtggagcagggattcaaatcccagttttgatgtctataaagtcctcgctacgttattttatacttcctcccctagaaacacagattttggtatcttgacacacaattttggtatagcctgggttaatgtaaccctggtgatatgcagggatgtagcaagataagaggacctcctggggctctggtactgaggatgccctaaatcccatcagggcccctgtgtaaaggcccggattgctttggcctccacagtcactggaacccatccatagcctcactcttctcttgtcctgtgtcttcccagagaagggataaaccgccaggttgaacctctggaccctccggcaggctctgctcctggtgagcacgtgtttgtgaagggctatgaaaagggccaaccagatgaggagctcaagcccaagaagaaagtcttcgagaagttgcaggtaaaaagctgtaattgttccctttcttggctgggctgcctggactgtgtccccagactgtcctgttactgaagccatagctgcccctctctgttgggacttcctgcatttgagcccctctctccctccttctttccagacctttttgaattcaaggtgcctaaggagcatgggggtcttargaccttgcattacatctccgacagatcatttgaggccctgtgtcagggacttcagacatttcttcatttgatcttcagtctgtaataggagattatccccattttacctggcaggatacctgacaaggccacatagggtcaccagaaatgatgagggcagggccaggcatggtgtcccatgcctgtaatcacagcactttgggaggccgaggcaggcggatcacctgaggtcaggagttcaagaccagcctggccaacatggtgaaaccctgtctctactaaaaatacaaaaaattagccaggcgtggtcgtgggcgcctgtaatcccagctactccggaggctgaggcaggagaatcacttgaacccgggaggcagaggttgcaatgagccaagatcacgccattgcactccagcctgggcaacaagagtgaaactccgtctcaaaaaaaaaaaaaaaaaaagaaaagaaaagaaatgatgaggccaggattggccgggcgtggtggctcacgcctgtaattccagcactttgggaggccaagacgggaggatcatgaggtcaggagatcgagagcattctggctaacacagtaaaaccccatctctactaaaaatagaaaaaaatcggccgggcgcggtggcagacacctgtagtcccagctactcaggaggctgagacgagaatggcatgaacctgggaggtggagcttgcagtgagccgagatcacgccactgcactccagcctaagcgacagagtgagactctgtctcaaaaaaaaaatgaaagaaagaaagaaatgatgaggccaggatcaaaaccttcccagggtccctcctgcccatcttgagtttagagcactcattgtctccttgccttctggacaatgaaaatctggcctgccccagtgatccctgaattcattcactcattcatttaacaaataccgattccataatatagctgtcaggcagtattctgggtgcttgggctacctcaatgaataaagcagcaggagttgactctcctcatggaactaacactcatgggtgactctttctagttaataccgtgtttcttcagtgagatagaggagtgcttctggaggacactgagagtcatttctactctccatcctcttgcatgaggccatttgctttgcccactccctcctttcctggttttctaggctgactttgtgaatctctttttttctggctataaaataaattttcatggtagaaaacatctaaaatataggagaaaaaaaaatcctagtcctgccacatagagatattaaagaatgttattagtgattatttccttctggtcttttgctatgcttggagtgataatacgtttatggtttaagtcatactaaatgctgttgattaattagaaacagggtctcactcttgtcacccaagctggattccagtggtgccatcatagctccctgtaacctcaagcctgtaaacctcctggactcaagtgattctcccgcctcagccttgcaaagcactggaattataggcatgagctactgtacctgaccatgatttttattttatttatttatttatttttccaagatggagtcttgctctgtcgcccaagctggagtgcagtggcacaatctcagctcactgcaacctccgcctcccaggttcaagcaattctcctgcctcagcctcctgagtagctgggattacaggtgcctgcgaccacatccagctaatttttgtatttttagtagagatggggtttnnnnnnnnnnnnnnnnnnnnatcgttccaagcctcctggccatgatttctctcacgcctgtaatcccagcactttgggaggccaaggcaggcagatcacctgagggcgggagttcgagaccagcctgaccaacatagagaaaccccgtctctactaaaaatacaaaattagccaggcacagtggcgtatgcctgtaatcccagctacttaagacgcttaggcaggagaattgcttgaacctgggaggtggaggttgcagtgagccaagatcacgctattgcactccagcctgggcaatgagagcaaaactccatcccaaaaaaaaaaaaaattgaggggttgcactgtatagtattctaccataattatcaaaatctaactaagctctttttttttggagacggagtctcactctgtcacccaggctggagtgtggtggcgtgatctcggcccgccacaacctcctcctctcaggttcaagtgattctcctgcctcagccttctgagtagctgggactacaggcgccccaccaccacacccggctaattttttgtaattttagtagagacggggtttcactgtattagccaggatggtctcaatctcctgacctcgtgatccgcccacctcggcctcccgaaatgctgggattataggtgtgagccaccacgcccggcaatctaactaaactcttattagacattgaggttatttggtttttcactgttagaatgatgtgacagatgtgacagatgtcttcatgcataagcctttgcacttaggtttattttcttaaactaactccctaaaatgaacttacttgagtcaaaagatgaatgtgaaagcttttgacaaacatttcttagaaaagctgagccagcttaccttaccctactggtatataagagagttttcaggctgggcgcagtggctcacgcctgtaatcccaacactttgggaggccgaggcaggcggatcacttgaggtcaggagttcaagaccagcctgaccaacatggagaaaccccgtgtctactaaaagtacaaaattagtcgggcgtggtggtgcatgcctgtagtcccagctactcggaaggctcaggcaggagaatcgcttgaacctgggaggcagaggttgcggtgagccaagatcacgccattgcactccagcctgggcaacaagagcaaaactctgccccccctccaaaaaagggggggttttcttgcagtcccaccaccatcattaaaatctctcttatctgtcttgtccaggctgacttcaaaatttctgaggagtgcatcgcacagtggaagcaaaccaacttcatgaccaagctgggctccatttcctgtaaatcgctgaaaggggggaacattagctagccagcccagcatcttccccccttcttccaccactgagtcatctgctgtctcttcagtctgctccatccatcacccatttacccatctctcaggacacggaagcagcgggtttggactctttattcggtgcagaactcggcaaggggcagcttaccctccccagaacccaggatcatcctgtctggctgcagtgagagaccaacccctaacaagggctgggccacagcagggagtccagccctaccttyttcccttggcagctggagaaatctggtttcaatataactcatttraaaatttatgccacagtccttataattggaaaaatactggtgcccaggttttcttggagttatccaagcagctgcgcccctagctgggatctggtacctggactaggctaattacagcttctccccaacaggaaactgtgggatttgaaaaggaaagggaagggaaaacagagaacctagtggtctaccaagtggttggcaactttcccaatgtctgcttactctgaggcttggcactgggggccagggcctgccccagggctcctggaatttcccttgatccagctaggctgggacactccctaaatcagctgcgtgttgttagcatcaggcagaatgaatggcagagagtgattytgtcttcataragggtggggtacttctccataaggcatctcagtcaaatccccatcactgtcataaattcaaataaaatgtctgaacaagggtgtctggatgtgagctggaccatctcaggagagaacacaagtgtgaggcagctgctggcccctcacctagtctggggttcctttaccctgtaatggggggtggggggtagaagatggacaagacaccttaacagtccctttggcagtactaggcagaagaggcccatacttgggtccaatgtgtgcagcaggcaaaacattttcccttctaaatgtgggcccagaccactgccctgtcccccccacattaagaagcagtagccacagccaagtttcaatcatttaattaacatctttaaatgaaacacagttttcttcatgtgtctcactcaggcttcagggcagagggaatggatttttagacatatcaaagactcaaaaatttaaagaaatatatatatgtatatatatacttctaacattttatggaaattaaaaatcagaggcttttggtctctccatttactctaggtcaagctcatttaccccagaggacaaagaagggctgcctcttctagaccctcccttctcctttgtcctctgtcccacccagcagggaaacaagctcagaagatcctaacaggatagagttccagtaatgttggaggagggagagggaaagagaagtcaggttctctcccacctccagccattcccaggttgctgccagggcctggtttcatgcagctttgacccagtcctggatcctagggggtggggtagatcaggagctctgagcagaacagtgctcactgattatcctctttccccaactcagtgggcaggtgcagcgtacacccagcagcactctccactgcccacaggcaagggaagaatattgattgattagctacaaggagaagacagtagtgactagtggaaaacaccctggagagggccagaggaacctggctctcaccacatcccctctgttcccagccttggtgagggggcggggaggtcatgtcaacctctctccttggtggtgaagctaaaagcaaggttccttgccagactcaagcccaagtcactgttaaggaaagaggatcaagaaagaagcggtggccctggggggcagccacgctgctgtggacccacaggggccaatggggaagccagcttgcctagacaggtggcacaggctgaaaatagaaaggttaacattcccggagagtacagtaagagaggctgatacctaggggaccaccacccagcctgccctagaagcactgggtgcccctcattgactagagaagacttgagtaaaatgcacctgtggcttcccatccttgtcactcagcgttagctgcccccagtggaaccacctgtgctgaaaggcagctgcagaaaggacatgcaccgaaatgaggagagagaaaggtcagagaatgaagtgtggagggccaggcctgggcccactgctcaaggaagctccccccctccagatgctcccttccatccacctcctcagtgcttgctcagcccaaaggctcctgcctctgaagtgctgggggcccacccaccccagtgtggtcaaggaggcaaggggcaggtgcttgacactgccaagtgccccgagatgactctactgctcacccatttctttgggccctggcagtctcctacttgtccccagcatggagcacctggcagaactggaaggcaggagggtggttggtgagttgaggcacaggaaggccaatcccctctgcaccttttgtgctttggaattccacagccccacacctgcccccagcctagagaagcctgtgggaacacaatgacttggccaccttcaggaaccaagaggagtaaactggactgggcaggagggcacagactggtcccaagctatgggctgactgccggggatggattctgctgccatgtaaacaggcccttggaatgcaacttcctgggccctggaggatggccatgcagccacttttcaaaagtgctttgattctggactatagtatgtgcatggtttggacatgaaaaaaaatgaaactcaggtgaggtgtcctgctcccaactctgcagcctcagggccagcagggggcgcagccaccctctcccgccagctacccacttcaagatgaggctaaggccaagactgaagcggcaactgccagaggtgaacccattcgggaaaaggcatgagcgcaggatgactctgaggacaggagcaacaccaggcttgcataagtatcgaaggccgtggaggttaaggctgcaggcgccctctctattaggttgtgtctgctgtatcctctcgtccttggagctgctcgggtccctgagattgtgtttctgggatgggtcagcagtgccagtgaggtgcctggtggtcaggccagctctttctgtgagtctgggggagaaaaataagagacacttagcaaggggcctcctggcttggttctggcactaggagcccaacaaagcataccctcacccaaccttcttaccgctttgatttactgacagtgcccgcagcactgggctggacaccctacacatgttcagacactataatgtaggtgtcactgccccacactttacaatgtagctaggaagggtagggaaagaggcaaagttggaattcaaacacagtaggcctgacactcacacaccattctcctctgggccccagcaagggtgacagcttgcccttcccaggcattctcagaccagaaaagttaaagatccaagaacaaatcccccatggcgggacttcagattcctacttcccatcatcagcaatgggacctcaccctagcactgcccactgtacctgagcccgggaggcccatcttctcctctgggcccaccagctgcaggacacctccattctccgccagctccctcttagtcctgtcctgggtgtgagggagcccattggtgggaggagcagtaaggggctcagctcgagggtaactgggggaggcgggtggggggactcccacagacggcttgcgggccacaggtgggggagccttaggtgacttctttggggcctggggtggccgctgctctgagatgctccggagttctgccaccagattccgctggaggtcagcctgggtctcaggggacacgggccgctccagctgcagcttcctagagcccttggagaagatgaaactggccgttgaggcaggggactggggaggccgtggctctgcctcaggcggtccgttgggctgagcacttgagaggccttcactggcggccaggctgcaggccttgagtcggaccgcagcatggagccctgaggagggggcaggcactgggctggcccgccctgacagggcccttcgcagtggtttctggggggccgatggccccagtgctggggtgggagcccctcctggagcacccacggagcgcagccgcaccatctgcaggagcgagggcgtgaccaggggcgcacctacgtcctccctgggaggcccaccacccttgctacagcccaccggttccttctgagggagcttggccacatgccctggggcggaactagcaggagctggggctggcggagctggaggagggtctgggctacccgggggctgaatctgcaaagcagtagctgaggaggacgaagcagccggggagctgacaagctctggggagcctgaagggcctgcaggctcagggctggccacagagaaaaaagcctcctctggtggggggaagtcagccatggacaggtcctgctcctcaggggcagggggtgggggagggggccagttgggatcttggaggggctcctcagcagtctctgaggcagatggtgcctccacaaccacctctggcttcttagtgggtggtgggggtggatgataagatgggggtggggaaggtgggggtgactggtctttggagatgacaggagactcctgcagtggagtcaaggttgtctggggagtgggaggggactgaggactggcgtcagtggtagaaacaggcccaggaaccacagcaggggcggctagagcaggggcagctgggttagggctcctgggcttggagggaggtggggagaagggggcaggcaccttggggtgaggaggtatgacaaacctgtcacccaggggggtcaatatctgtggcccagagcggtctgagggggctgggtcagaggaggaggaacataaagacgtgagggaagaggagacggaggccccaggggagcgaagagacgtgacacgctctggtttagggggctgggccttgcctggggaagcagggggacctgccaggcccttgggagggagggtgggagtaccactttggctcgagtatccactggagggcgaaagtgtccgttctggggaccgtggggggcgccgggaaccacccggagacaagccaggtacccagctgttggctgggttgggtggacagggtgctgcccccgccccttctgagccaccagtggtgggtggccgaggcagctggggctgctgcttacgctcaggcttagggggcaaccctaatggcccatcaggcactgctaagccccgctgatggagggagtgggtccggcggggagggggtggaggccgcttcagcttacgcagggacacactccggccagacaactgcccactgctccgaatgctgagtgtgtctgaggcctcagcagtgctgcccccactgggagagcccctcccactgcctccctggggagggggtaccacgctattgctagccgtagagctctccggctggccctcagagccacccttagaggagagggtggaaccgtcagacacaatggtgtcggaggattgagagtggctccaggtgtcactggaggaggatgggtggcggctgcggggctgtgggctggagacggaggagaagcgccccagcgagcggactgaggctgggctggccgagtgcaggctgcagcggcttagtgtgcgcaggctgcagcggcctagggccaccacgtccactgtaggcggcagcacagcatgtggaatcaacttcgacaggtaggtggcctggggggagatggacatggccgggctcaggggctctgcaggccctgcccctcctgtcaatccaggcactgctagggacatgggccgggtcaatggtggggcccgggtacccgtggaccggccaacaaaggtgtcatcccggtagacacggtcaatgtggcgctgcagcatggcctctgtctcagcgccagcctccgcctccgcctccagcgcctgcagggacacccgggcccccatccctgaggtgcctcgggggcggccgtccactgtggggatgcgtacggcatcccgtgcaccaggagcccggggcgtgcctggtgcctcacgctcattcctcaggcctggaagggacagggaggaggtggggtcagcagagaggggatgaccaaggctccccacccaccccaccactgccctcctaacccaggcctcaccaagctccttctgcacatgctgcgggagtcccagcacagtgctccgccgctcccgccgacgccgccctgactttccagatttgggaaatgagtcatggggtcggaaggtggagcctgggggccagtcgtgggagaaaaactgttagagcaaaggactccaggcacattctgcagggcactacttttgtaataagagctctgcgagaaatggtttccacagtcaagtaggtatgggcaaggctaggttaaacaaagctagaggcttctttctgtaagactaaggctactaagtcaatgatggtaatttccctttagtgatagcttactatttagtaaacatattattacgtgttagtcgtcattctaaacatttggcattcattccaatagggtacttatcctcatttttatagaacatcaaacagaagttcagagaggttaagggttttcccaaggtcacacagctggcactagttagttacaccaggcttccaacagttaagattttctaactctttttttattttttttttgagatggagtctcac

SEQ ID NO: 95901 - DNA, 99212 bp, Homo sapiens
  misc_feature (1)...(99212): n = A,T,C or G
aggtgggcagatcaactgaggtctggagttcgagaccagcctggccaacatggtgaaacctcgtctctactaaaaatacaaaaaaattagccaggcatggcggtgtgtgtctgtaatcccagctacttgggagggtgaggcaagagaatcgctcgaacccaggaggcggaggttgcagtgagctgagatcgcaccactgcactccagcctgggagacagagcaggacttcatcacagaaaaaaaaaaaagcatttcgaatttagcattacttaacctgtgaaaacattctgtagacacctgagaggagttttactagttacttactgaactttggtctcaaaagacaccaaaatacaactcttataaacacattgactaagaaacttctgatgagttcacagaaattctagtgttttagttgtgaacagctgaatgggttcctgatcctttgatgcagtggggagaaaggcaacttacaaattacactgataggcaagtgaaatccatcccatatatttatatatatactagtggcaatgcttattttaggactgcatgtcattttgcataccatacataatacttgagaaaaatctgtggtgggtgctttttctgcctgatttgaaaccagtgatttttctttcaggtatagaagccaagaagaatgtggtggtaactcaagccgaccaaataggccctcttcccagcactttgataaaaagtgtggactggttgcttgtattttccttattctttttaattagttttattatgtatgctaccattcgaactgagagtattcggtggctaattccaggacaagagcaggaacatgtggagtagtgatggtctgaaagaagttggaaagaggaacttcaatccttcgtttcagaaattagtgctacagtttcatacattttctccagtgacgtgttgacttgaaacttcaggcagattaaaagaatcatttgttgaacaactgaatgtataaaaaaattataaactggtgttttaactagtattgcaataagcaaatgcaaaaatattcaatagatgcactattcttgtttttactgcatgcacgtaatccagtatttggaaagtaatccagtttgaaatgtgaagatgtattccggcagaatagtgagtagaatgacatgcttactatacagaaggcaaaaataggactctcaggtaatagtttaaggaaacccttgattccttatatatgtttaagaaggttagttttctgtttctttgcagtttttcttctagagtccatagcaggaaagtatgtaaccagaattggttagtgtgaccccctcaagtagcaagtgatggaaaataagagtcaaataccttgatgtttgtgatctctaactcaaaaaatttgaagtgttttaagttgtttctgggtaagggagatgttaggagaaaggaaatgctgtaactaaagctcaattattatcagttctatgctaacgtatacattttaatcatagttacctaagcagcatgcattaattgaaccttaaaatgttcccagcaggctgggcgcagtggctcatgcctgtaatcccagcactttgggaggccaaggcgggaggatcacttgaggttaggacttttgagaccagcctggccaacttggtgaaaccctctctctactaaaaatacaaaaaattagctgggcgtggtggcgggcacctgtaatcccagctacttgggaaagctgaggcatgagaatcacttgaacccgggaggcagaggttgcagtgagctgagatcatgccactgcactccagcctgtgcaaccagagcgaaactccatctcaaaaacaaacaaaaagaagtattgaagtgtaaaacactgttcttgcccacaagttgattctagtctagttcaagacacatgtttagtaaagagacaacatgtaatttaaacaaactttttttttttttttagacaaagtctcactctgtcacctaggctggagtgcaatggtgcaatcttggctcactgcaacctctgcttcccgggttcaagcgattctccagcctcagcctcctgagtagctgggactatgggcctgtgccatcacacccagctaatttttctatttttagtagagatggggttttgccatgttggccaggctggtctcaaactgctgacttcaggtgatccacccgcctcagcctcccaaagtgttgggattacaggtgtgagccactgcgcctggcctaaacaaactttttgaaaagctgtttctaaaagattccttaaattcagatatgacagctaattacctcatcataaattacttttatactaattgtttccagggttttagagtagttgaatgtttatttcacaaggcaccctaaattctatagaaataaaacctcagatgagtctccttcttagagtgttacaatgaatgggagtttacaacttttatgtgtcatgtttccaacagctgtgtttggggtggtcactggcaggaggggaccgtatctcagaatggcacattatttctattttacacatgagcaaattgaggcatagagagttagataacttgcccaggttacacagattgtaagttgatgaagctgggatttgaatcttcacatgtgtgtacttataaatacaaatgtaaggaaaactctagtgagtccacctcttatattgagttattactgtgtgagtgccaagtactgttttagatgctttacatatactattttgtttaatatcctttttaaagaataaactaggttggtgcagtagctcacgcctgtaatcccaggactttgggaagctgaggcaggtggattgcttgagtctcaggagttcgagaccaggctggttaacatggcgaaaccctgtctttactaaaagtacaaaaaattagctgggtgtggtggtgcgtcctggtagtcccagctactcggggtgctgaggtgggagaatcacctgagcccaggaggtcgaggctgcagtgagctctgtaatcatgccactgcgctccagcttaggcaatcagagtgagaccctgtctcaaagcaaaagaaaaaacctgaggctctcaataacttgctttccttcatgcagcttccagtggctggaaccaggctttaaatttactccaaaacctttatgtgggatggcaccctgccctgcctttgcaccatggcccagctacatggggttcccctggagggaaatgtggagcagagccattccctggagaggaggttcaagtatagagaggatcagcctcaaaacactggtgctgccaggtgcgggggctcatggctggaatcctagcactttgggaggctgtagtgggaggactgcttcagtgagtcgtgattgtgtcactgcactgcagccggggtgacagagcgagatcatgtctcaaacccccaaaatcagaaaaacaaaacaaaaacaccagtagtgttgagggaaagtgaaaaggggaaggaagtgatcaaagaccagctgaacagcccaagctaagcatggttccactacagagcatgtggccagtaaatctttgctaagggacttaaatcctattaattggggagctacatgtgtgggcagacaattcacagcccctgtgatgtgatccactgatgtcatcatttccctgggccctagcatctgccgttcgctgcttttttgactagatctgcatgatcaaatttattttatttttttgaggtggagtttcactcttgtcacccaggctggagtgcaagtgcagtggcccgatcttgacctctgcctcccaggttcaagagattctcctgcctcagtttcctcagtagctgggactacaggcatgcgccaccatgcgcgactaatttttgtacttttttgtagcaacagggtttcaccatgttgcccagcctagtttcaaacttctgggctcaagtgatctatccgcctcagcctcccaaagtgctgggatcacaggcgtgagccactttgcctggccagtgactatatcccagatgccagtttcatacagtggtattaaggaaggaaaatgattaaatttactgaaaataatgaaggttcacttgtttactcacatccactggttcattttttagttcttactttaatgagcgaatctgagtagtagttttcatgatcataaacagtcaatgtaaatgttggaaatataacttttaattctttaggaccagcaacatttgataagggcccccagtgtgattcctcccgagttttgcttttgaaatggttacatcttttttttttttgacagagtcttgctctgttgccaggctggagtgcagtggtgcaatctcagctcactgcaccctccgcctcccgggttcaagctattctcctgcctcagtttcctcagtagctgggattacaggcacgcaccaccatgcccagctgatttttgtatttttagtagagacggggtttcaccattttggccaggctggtctcgaactcctggcctcaattgatccacccgcctcaccctcccaaagtgctgggactacaggtatgagccgctgcacccggcgaaatggttacattttgtcaagtgggcaaatgggaagaacagaagcccgtgaattttgggctactttgaggcaaaatgctttattttttctaggtccatatggatggactgctaataactgctaagttgaagttaaatggactcttgttcttaaaaaaaatattttgccatatcctctgcaaaactgcttattaatttgcataaacttttttttttatttttgaggggggtgagggamagggtattttgctgtcgatggaatgcagtggcgtgatttcagctcactgcagcctcccgggctcaagccatcctcccatctcagcctcacggatagctggaactaccagcacgtgccaccacgcgtggctaatttttgtatttttaatagagatggggttttgccatgttgcccaggcagatctcgaacatctggcctcaagtgatcctcctgccttgtcctcccaaagtgctgtgattacaggtgcgggccaccatgcctggcctgcttaaactattcagttaaaaacaaacaaaaaagaggccgggcgcggtggctcacgcctgtaatcccagcactttaggaggccgaggcgggcggatcacgaggtcaggagattgaggccatcctggctaacactgtgaaaccccgtctctactaaacatacaaaaacaaaattagccgggcgtggtggcgggtgactgtagtcccagctactcgggagactaaggcaggagaatggcgtgaacccgggaggcggagcttgcagtgagccgagatcgcgccactgcactccagcctgggcgacagagcgagactccgtctcaaaaaaaaaaaaaaaaaaaaaagatacaagtgagtattcttaatagtatgtcaattacatctcaaaaaagtcaaaaaaaaaaaaaaaaaagaatgaaagaatacctccccaaaaatgatacaagaaaagattcacctaaatctgttcacagctgtctgcagagctcctactgtgtgctgagcctgggggtaaacagggcacggacacgtttgggaggggattacaggccgggtttccacactttttggtccaggcaaacccagacgagccagctggctcaagaacttggcagctgcgcgatgactgaacagaggctgcgttcgaacccactactgcaagacttaggagcccccgatgggaactgccgtggttcactgccccagccccgccgctcaactgccccgccctggcctacgacatcctcctgcccgcatggactgcgcgcagcgccgccaagcggggagcccagctcggtgctagcgcccgcgaagcggaggaggccggcgcccgaggctgggcgaagttcctcctagcgcagcgaggaccggagggcaaggccagcgcgcgccgggcgacctgcgtcccgggcacagacgcgacgggcccgcacggggcggggaccgcgcgcgcctgctgggcctacggctgtggggcgcgcagagtccacctggcggccaagggcgctggcgaccgctgaagctcctgggggtgttcggggtccgggctgcgcctgtgcccgcgggaaggctgggcgcttcccacacacagaccccgctccgggccagccccgcagggagactaccagggctggcggtagctgggcgtggtcgggtcgggggcggctgtgggcggccggcaggcagcgcgcggggcagccctcggcagacggccaatggcggcggtgctcggggcgctcggggcgacgcggcgcttgttggcggcgctgcgaggccagagcctagggctagcggccatggtgagtgcacagcggccgcgtgggtgggggtccggggtcggggggcggtgcgaggcccggcggcgtcggctgagggaccagcgggactggggcgaacccggcgtgggccgagccttggagctcgggcgtcgggtcaccgcgtcccgggactgaccacctgtccggtgcgccgctcagagaccggggtggccgcagcctccgccacttgcccttgactttacacttccgccgaagcctacgaacttgccaaccggaaacaaatgggaacgaattttgttcagcaactacaaaaggcagatgtgaaaagtagttgcagaacaattcggtgcccgctgccgctcgttgtgctgaggacgaacggcgctgcgggcctggctccctatggcggctccctgctcgcgcttcactccaaggggaacccacagaggttttggaggagttattaataaattgtcttttttggtgacatattgacttttctttccttttccaaggggccgtcagttttcctgctgtagaaattaatattttrgagtaaatggagggaaagttttaacatgcagcaccacctagtggaaaagtggtgcgttaaactcaccatctcattttaagttgcattttaaccgcccatttcagtttgaaatgttttgttttgttttgttttttcgacacggagtctcgctgtatcgccgagcccggagtggagtggcgcgatctcggctcactgcaacctccatctcctgggttcacgctattctcctgcctcaccctcccgagtagctgcgattacaggcgcgtgccatttcgcccaggtaattttttatatttttagtagagaggggttttcgccatgttggccaggctagtctcgaactcctgacctcaggtgatctacctgcctcggcctcccaaagtgctgggattacaggcgcgagccactgcgcctggcctgaaattctttaatagaagaattttttttttttttttttttttttttttgagaaggagaatcacgccgtcacccaggctggagtgcagtggcgcgatctcggcgtattgcaagctccgcctcccgggttcacgccattttcctgcctcagcctcccgagtagctgggacaacaggcgcccgtcgccacgcccggctaatttttttgtatttttagtagaggcggggtttcaccgtgttagccaggatggtctcgatctcctgacctcgtcatccaccctcctcggcctcccaaagtgctgtaatagaagaaatttaaaatagctcgaagacggaggaagataggcactccgccgcttcttgtccacgaaggggagaacacaagttgagtgcctactgtcacctaggcgtgtcttcaggcgtactctgccccaggtgctagtgatccagtaagattagggtgttctgggaaggaatgagtcaacagacatgatttgagcgctgccccatgccaggctcaatgctaggtaccctcacattcaagatctgtaatctaagcctttcaaaaaatcttggcaggtagatattataatatccccactacagacagaaggatcccggaattcagaaaagcggagtttagtatcccacagctaaaagtaacaaagttaggccttagatctagtttactctcttcaaatcmtagcctaccccccatcccctgaaaaaattaagcccaccaccaagggttctgctgtgaatgtgccctcatgggggcctttgatgttatgtagatgaagtggctccatttcccagtcctgggtgtggtccctgctgctgggcaggtgtctgttgtgggcataaagtgcataccactgatcttagcggggatgtggatggtccagcactcagagaaaacagctcagtgtgttctacagactccaggttcctgccttattacaggcagcatgtttaatggttttctttgcagctactcagtgtggacacacataattctgtttcttttccaaaattctctgagttgacaaaataagtgtttaataagaatttcagaattctttctttttttttgagacggagtctcgctctgttgcccagactggagtgcagtggtgcggtcttggcgcactgcaactttgcctcctgggttcaagcgattctcctgcctcagcctcctgagtagctgagactataggcgcgtgccaccacgcttggctaatttttgtatttttagtagagacgggtttcaccatcttggccaggctggcctcgaactcctgaccttgtgatctgctcgcctcggcctcccaaagtgctgggattacaggcatgagccaccacgcctggccaagaattttagatttcttatgatagatgtatgtgtaagtttttcagaactgtcactggaaaactgatgaatgaatctcttttgattttttttttttaattgagtcggagtttcactctgttgcccaggctggagtgcagtggcacgatctcggctcactgcaacctctatcatccgggttcaaatgattctccttcctcagcctcctgagtagcagggactacaggcgcctgccaccacgcccagctaattttttgtatttttagtagagatggggtttcaccatcttggccaggctggtcttgaactcctgccctcgtgatccacccacctcggcctcccaaagtgctgggattacaggtgtgagccaccacgcccggacttttttttttttttttaagagacagggtctcactctgttgcccaggctggaatgcagtggtgatcatagctcactgcagcctcagtcatctggtctcaagtgatcctcccacctcagcctcccaagtagctgagactatggacatggtccaccacacccggctattttttaaaatttttttgtagagacgaggtctcattgcgttgcccaggctagtcttcaactcctggcctaaaatgatcctcccacctcagcttcccaaagtgccaggattacagatgtgagccactgtgcccagccctagtaaatgtttttttttttttttttgagacagagtttcactctgttgcccaggctggatggctgggattacaggcgtgtgccaccatgcccaactaatctagtaagtggtttttaacaacaagcttttgcatatttttgtttaattaaaaagtattctctgctgggcacagtggctcacgcctgtaatcccagcactttgggaggctaaggtgggcggatccctcgaggtcaggagtttgcaactagcctagccaacatgtgaaaccctgtctctactaaaaatacaaaatgttagctgggcgtggtggcatgcacctgtaatcacagctactcaggaggctgaggcagaagagtcgcttgaacctgggaggcagaggttgcagtgagctgagatcacaccrctgcactccagcctgggtgacagagcaagacttggtctcaaaaaaaaaaaaaaaaaaggtactctcattctttccttttgttagttgtggggaagaatagccgacctagcaaagaagaaaaactagaaaactgatttattagtatttttttcttcatagaaaaagttgtctaaaggtaaaatctttttcctctcttaatattagtgataaatgattttgggatttctgaagtgggagtgagttgcagcttaatggcagagaatccagggaatgcagcttagcccacagttgccctttgatgaggagccttcactaatgttcatctttctgggtgacagcctctctctcacctgagcctacagtaactctgcaagtaggtaaggcaagaagtattgcctggaatgagaaccctgctttcctgacttctagtcaagtgtccatatcttctctctggccctgatgtttaaagttatttcagttaaaaaaccaatagcatgggaagtgtgggcctgttaaccaacagaacctggctttgtgaatgtcatccccaggatgcgtagaaacaggccagacagtgcacacaagtgctttggactgggcagtactctggccaaactatggagagagtttktctgactggtgctctgagaagagggcttcataaacccaccccactgaggccagggctttttacctgtagtccagaggatctgtggacccccagaagttagataaaatcctatgtaaatgtgcatttgtttttccccatccggggattggttttcattagatgtgacaggagatggtaattccaaatagttaaaaccatctttcattcctttgttctcaaaagacagaccaaaacaaggctggctctgtacaaaataagctgtctctatggtatgttccctctggcccccttactgctgcctcaaacgtcacagttcagcttctctggcttattagagatataacagagagtagtgaaggctactgaggtgatgtagggccatccaaagagcaatagaccaggagtttggagccttgaattttaattctggtcctgccaatagacttgccacaagtcctagaattctgcagtgtccaagatggccggtggtaatagtcaatctttgttgtatctgtaataaaccacagaagggccgggcgcagtcactcatgcctgtaattccagcactttgggaggtccaggtgggcagatcrcttgagctcaggaattcaaggccagcctgagcaacatggtgaaaatccctctctaccaaaaatacaaaaaattagttgggtgtggtggtgtgcacctgtagtcccagctacttgggaggctgaggtgggaggatcatttgagcccaggaggcggaggttgcagtgagctgtgattgcaccactacgctccagcctgggcgacagagcgagaccctgtctcgaaacaaccaaccaaccaaccagagaagctgaattgtgaagtttgaggcagcagtaagggagccagaggtgacatgccatggaggcagcttattttgcacagagctagccttgctttggtctctttaagagaacaaaggaatgaaagatggttagaatttgttgcctttcagacttttctacatctctgcttaaggtaaggagccataagtttgagtttgagtaaacttgtacattttcagatatgaaatgtgttctcttcatagtcatcaggtactcacaggttgactgcagaggagaggaaccaagctatacttgaccttaaagcagcaggatggtcggaattaagtgagagagatgccatctacaaagaattctccttccacaattttaatcaggtaattgttataaattcttgctagggctgtggtctattttagtcaccttaggccataacactttctgattctgccagttgtctggtcccatgtagatctaggattcaactcttcccttctttaagaattcagtgatagagtgacatccttgttgacagttgctaccacccacctgggtggtgtttagctctgggggaagagggtggtttgtgttacttggaaaacaaattctgaaaccactattgctttggtatggtgttggttaggatatgtagtttcttttgaaatttcaaataacattaaaagagagtgtaagccttttattattgattattattttttgagacagggtcttgctctgttgcccaggctggagtacagtggtatgattgtggcttactgctgcctcgacctcctgggctcaggtgatcctcccaccttagcctcctgagtagctgggactacaggcatgtgccatgcccagctaatttttgcattgtttggagaggcagggtctggctatgttgcccagactggtctcaaattcctggcctcaagcgatcctcctgccttggcctcccaatgtgctgggaatagagatatgagccactgtgcccagcctgagctttttatacttatcagaaaggggcatgaataaaactggttgaggaagatgtacctgcttgacttattttccctgactttttctgggccgttggtaatttttctttcttcctgcagttaaatttctatctctcagtcatctcccaggctgcacccttttccctgactggcttatttttctccagcccagtagccagatcctgaaccttttcttaaaacctgacctcccccttggaagtcagctttaacaaggtaactgttccattagggacccaccctgtttagagagtcatctcccatgacttaaccttcagttattacaccactgcatttgtaaaaggtaaatgcttttgactattttgtttgttcagttagtttggtaatcctttggacagatttattgtttttatttatattgggtgtcggcatctagaagtcagagaccatgtttgcttaaataactctctattgtacccaacacagttctgggtacaaacaggcatttgataaatgcagacattgattacagtgtttgctagtttctagaagggtgtgtgaggaccagatttgcaccaaagaaaccttcggcatgttttcctagtaaatgtcattggctccactgagctgcatgcccgattctgttctctatccatctggctgccagcctctgctgtgagtctccaactcctaaggaaacctggaccaagcagactccctgtccccgctgccccacgtgctcaacagctcttgttaggggcttagcacgctgtggctggtggcagggaatcccattggtacagtaagcctgtgcataagctctaggtagcattttccaagcttattaaaattcttacatatgtacagcttgacttctttaaacctggcctaatttattgggcttgaacatgtggcttaaagtactcgaatggtgttgcctcaggccctgcctatgattcagtcctccagcaccattctgaccttgcgctcagggtgactttcagcaatggtagggaagcatactggattgattgtaacattattcactggggcatttaattaagtagactttttttttcccattcacccaacttttaggaaaaagaggcagatgacaagaaaatcagctgatgtcagggaatgtattcagagaaccaacactgagattatatccgggggtcagttttcccactaggctcctatgacttctgcgtgtaccatggcctgtaatggtaactggtgtcctgacagttgtcagtgccctccagcgaaacacaactaggaacacacctacagtcgaacaagttgagcttattgcttattgctgtgagggagagtgcacaccaaagggcaccgtggggtgagcccatataggatttgggctgtggtagtgatttggggactttactctggattagatgctgtcaggaaatgggcaactctgtcatttggtattttaataaatcgtatctatagggagagtagattaaagcagtgccaaagctgaaactgaagaagaagcaatagtcactcattagctgggagaggaggatgtttggtattttgtggcttggacaatgttcatgttttgtctgtgttcaggtattgcagagtggtcttgtttttgtcttcatccatcatggtcacagagtggccttgtctggtgttgatgttgatgttcgaaaggagagcaccaaggactggttgatagtaccaggccagcgcccaggtgtcaggagttggttttctcttgctcacaactcgtgagtagagtagtgaccctctggcgctgatgggtcctcattcatctttcatttaggacagaaaagccattgttttttattgtaacaacagcataacattaaaataggatggtgtaagtaaaaaaaatttccaatcgcaactacttttatttttctctgttctcttctggtctttctccatgggtatgtttgtttgccaagtatgccagagcatgccagttatacatgtggttacatttaaaaaaattttttaaattttatcatgaaatatttattaattcaacaaagatttattaagcattttctgtgtgctaggtgctactctaagctcatacagctcccatcccagtgggaaaataaacaataaacagatgaataggaaatataatttcagctagtgatgagtaccctgaagaataaagtagggaattggagtggagggggacagaggcactcttggaggtagagtggtctggaaagtcctctctggggaggggatctctgaggcctgaataatgtgaaggagctcagcacatggtgatccaagggaagagctttccagctggagaacagcaagcacagagtttccaaagcagaatgaccttggcatgattgagccagaagcagaaggccagtgtggagtggagcaggcgaggagacgaggggaagggtcagagcatgggggccttcttggcgtggtgaggagtttggattttattctgtgaaggaaagctaatggaggatttcaggcagagaagtgtcatcctgtggctgtgttctaaaaaatcaycctggctgttctgctcagaataggcggtaggaaggtcagagtggaagcaggcagactctgtagaacactgttgcagatgtctagaccggggatgatgggggtcttatggaggtatcagtggggatggagagaaatgtagggttccacatattttgaaagtagaataatcaagacttgctgaatgattggatgtgtgataggggagggtcaaggatggcaccaaggttttggttcaagctatagtgtaaagggtagtgccactggagccatttactgagctgtggaagatggggtgcaaggtggggggcaggggtatggaggtgagaatcctgttttcacatgtcaggtttgaggtacttattagtcatccaaatggagttattgggttaggaggtgggtgtaagaggctggagttcaggctgagacagcagtttgtgagttgtcagaggggatcactgtgagagcatggtccagttaggcaggagaggacaggatcagatgggcagtggaggcacagcgatgatatgtccattgtggtttagatgccaataggccgttacattcatcctgggaaaaagagggccattctctcctgattgcttttgttttttagtgagatcatcaattgagagcaagtaggggtggaagggaagagtgttggagacctggggagataagagaaggagtggaatagtcattttggagactaagatagtgaaaaaacttgagaaacgtggctggttgctaagcagttctcagtgtcactacagatttggggtcaaacatttaaagtgaacattttgtatgttttttttyctgctgtgttccgctgctgtgcacaagctggagtagatgcagagttgggcttaacaaggactgaacttttgctaaatgaatgcaatggaggaacagagggacaagggaaaaaagggagggacagaaacgctggcccttggagtctcggcagggtagggaagtacagttgtgatggggaggtgatagtgatgagctgagagtgtcatttgacatcatctatttttttttttttcagatggagtttcactcttgtcacccagtctggagtacaatggtgcgatcttggctcactgcaacctccacctcccagattcaagtgattcttctgcctcagcctccagagtagctgggattacaggcgcccgccatcatgcccagctaattttttgtatttatagtagagatggggttttgccatgttggccaggctggtcttgaattcctgacctcaggtgatctgcccgcctcggcctaccaaagtgttgggattacaggcatgagccactgcacccagttgacatcatctttttgaagggaaattgagcaatgcctatcaacttttaaaactcacataccagagccgggcgcggtggctcacatctgtaatcccagcactttgggaagctgaggtaggtggatcacgaagtcaggagttcgagaccagcctgaccaacctggtgaaaccctgtctctaccaaaaatacaaaaattaaccaggcgtggtggcgtgcgcctgtaatcccagctactcaggaggctgagggaggagaatcgcttgaacctgggaggcggaggttgcagtgagccgagatcacaccatttcactccagcctgggtgacaaagcgagactgtgtctcaaaaaaagaaaaaaaaggacatatccattgtcctaacctagaaatttatcttctaaatattgttctgcatgtatgcaaataggatgtatggggatgtctattaaagcctgatgggcctctaattttttttttttttttttttttttttttgagacagggtctaattctgttgcccaggctggagtgcagtggtgtggtcatgactcactgcagccttgaactccctgggctcaggcgatcatcccacctcagcctcctgagtagctggtactacaggtgtgtgccaccatgcctggctaatttttgaatttttttttgcagaaagggggtttctccatgttgcccaggctggtcttgaactcctgggctcaagtgatcctcctgcctcagcctctcaaagtattggggttataggcatgagccgctgcaccaggcctctaattttttattgtgagcagccatttccatgagcatatgcacaccatggtgagaacatatctcccttgctgcaaccctgccctcagtggggtttaagggaggcctgttgtgctccatatactcatagcaatggcagcacctctcctggcctgagctctacagactggacaaagccacagtcagaactaaagacaccctctccctgaaagagtgtgacccacacttggtggtgtcatattgraaaaaaatttgggggccaggcacgatggctcacgcctgtaatcccagaactctgggaggccgagttgagtgggttgcttgagccaaggagtttgaggctagcctgggcaacacaaggagactccatctctacaaaaataaaaattagccaagagtggtggcatgcacctgtggtctcagttacatgggagggaggctagggttggagaatcatttgaacccaggaggtagaggctgcagtgagctgtgattgcactaccacactccaggctgagcgaaagtgtgagactatctcaaaaaaaaaatctttgctgaatatagggttaaaaaattcattttgtttgtattgctcaataggttatgagcatttttcagttctttagtctttttatttttaatacaattttcaggagtatgattttacttggttgggtgtcacagttaaatgatttgctaatgtagtttgtgtacagtggtatcacaagtttgctttagtcttcatttcttttgctgctatgaaaaatgaactattttggaaatatttcagtgaccgtggatgaaaaacctatttcttgaagctttgagttattccaggtttactataagaataaatagcccccaaaacacatttgaacttcttttctctcagagttttattytaaggtatggttagttccaaataatccaaattcattggatagctcagatggatacaaatacttggagattataagtacggagttttcaagggattctcctagcataggtggatgaagtagccataggtgtcagttgctgttagcctcctgtttccacccttggtggtggtacatgggctctgcagtgcgtcaatggacagtatgttggtgacagacagtgactctgtgagcagacagagcatggcagtggtgggactcgaggcagggagtttccacastaggagtgcttggacccagacagggtgggattggcatttgtaaaggaactttgcttttttgttgttcctgtagacagaaggtgggagaggtctgcaagtgacatataaacttaggtgtttggtaactgcaggatgtctgtgttgaaagaacaaaatgtcaggtagaaatgtgggtgtgagagtcccataaagacagattttgttatgcattgacatgtatgggatgaactggaagcttacaaaatccgaggagattttaagtttaaaagtaggtgcagaaggtgaggctttggaacctaggaaatagctactacaggtgccagcaggtggagccctccagggcaggagcccagccgggccaggcggcaacacccctttctgccccccagaaggctgtccctgttctttcacttytgaatacctggggctacccttgttcagcatggaaataagctcaggatcaggaacaggtaagcggcagtggctgggcgcttgggtgaatgataaattttgtgtgtaggacatgaggagtttccaatggtgattcaggaggaagggaccaagctttgtgagaatcagcggtggttctctgcggaggagctcctgggccctgtctgtgctttcttcggtgggcctgcccagcagggcattcagtcatattggatggaatcatatgagctggttgatattcagggcaaagtccaagctttattggttttgtatcttgttcatcaccctcaccttttggttgctgtgctgctgccactgaagctttctggagctgcagcgggagggaggaggagttctctgggtgcccaggctgggttggtggtgctctgcacatcctagcagcagtagcaccatatgtgactttggggttygtaaaatgtttcttttcctgtgtccacagagactcctgtgtagagcagttcaaagttacttttgctgccttactttataaaaatgttttattgaggaatttgataataggcttatggtgaacattttgaaacacttagtgaagtcaaaggcttgatgataccagaagaaagacaactgctgatgaaagtcttaacaatcctccacagaatattggtggaagtctcgatagctctcattgtgaatgaattagtttgggtttgattgttctttgttgtgcacatcaaagttatgagtgagtaatgcatctgtgcactctttaaagaggatattctacctgtggaggatagggaagcactcccaaagaggatgcctgtggcctgggcatcatataggttagaaaatgtcattttgtgctgggcatggtggctcacacctgtaatcccagcactttgggaggccgaagcaggcgggtcaccagaggtcaggagttcgacaccagcctggccaaaatggcgaaaccccttctctactaaaaatacaaaaatcagctgggcgtggtagaaggtgcctgtaataccagctacttgggaggctgaggcaggagaatggcttgaacccgggaggcggaggttgcagtgagcagagatcacggcactgcactccagcctgggcgacagagtactccatctcaaaarataaaataaaataaaaattaaaaaatgtcgttttgatttgaaagtataagctagtgtttgtgtgtctggcaccaggtaaagtgaaaactcgtatggctgtcacacacactgttgcatttaacatgtgctcatgattggctttgtaaccacagcagactagaaacctgagaaagtgttcatagttttcattggaatagaatagagacactcatattttagcaaactttacctaaagtgtgagaagctagtaaaaatatctgtgtagtgttcatgttggtgttccctttggagttcttcctgagcaggaccacgctgatgctcccaggaggtggctagaatgtcagtgttggcgtccaccagggtagggaaataagagcctgaaatgttatcatttggagctttgttgctgctgattgtgtcgtacagtaggtctagacctggcgtgtatttgtaaaagcgcatgcaacagatagatgaggagaaatgtaaaacaggtgtcaacaatgcaaatatgacaccacactgcagtgtgaaaacaccatggtccttacaccaccctttaataaaaatggacttttaactgcataatttkctcttagtcatgtagtaaatcttctgtttacagaacttagcctgagtattttgttaaagtcaagcagccaagaagtataatttcctcaacagtctttgtcttgcccttttacagatggagtaaaatcaggtgtgtaaaaaataaaaaagcagtttgagctgacgtgaaaggtatttcagatttatgctttgcagatgatattggtatgattaatgcattcattgcttttttttattgcttttcacagataatgtacatgatgcatggaaaatgttgtgggtttaaatctgtgccaggtttagactgtgaatatcaacagatgttatcatataagtaccataattattataaaataaaaaatttgtcatgaaatgcagtgacataaatttcatttatgtaaattgctttcattagtataaaaccttagtgtagctgttagggtctgtgaagcactttagatgagattaacttggtataaagtggtcacaaatgggttgctttaaatttaactgacaagaaaataacacccaaaacttaggaaattrctgaggcatttgcctgcattgctggtaccgcttaaataggttgactgtgaattaataacaatagactgctggctcaataattgcagaaaataattgaaaggagaccttaaataataacttaaaagtattttggtcttgctcatttctgttctgtttctgtttttcgttagtatgcctgcccaccgcttcagtactgccattatcaatagctttcgggtttgcactgcagttttgtccatagttgtggtgctttagggccatgacacagaacttgcatttagatgtgtcagaatacaaatattgggtgcctgatggagcagctgtagtggctgagcagtgctgcactcacattcctgtggctgggtagcggccagttgctttctgccctcaggagggattcggtccagcggtgtgggcaggtggctgaggttcttcttcctggctttgagctctccatgttttgctctttttcttacatccttttaaacaaaacaaagcagtaatattctctcccctgtgttgcagagaattactattatgttgcgcttttgatctaggttagagtggggcattctgactcatttactgaatttcgcagaaagacactaaacaagattgagatcatggaattacttgtggtcatactgggtcatgtcacagttaccagatgcaagactcacatccctggttcccacagcaacatttttagatcctactgtgacatagaaaggttgtttttttgattttgttgttttaggcgagatcttgttttccaaggactacttgctggattagttttctcccttaaatgggttttaccatacttcccagaggaagggaatattcgccagctgaaacaaacaaagctgtacttgtttgggagtagcccaggtatcactgttgagcaatcaaaggtcatttaattgtatcattaaaatcaatcctatcaaaacagcaaatgctgctaatgactctgtttgcttgtgtgctctctgccaacagggcaggatggaggcttttttttttttttgagacggagtctcgctctgtcggctaggctggagtgcaatggtgtgatcttggctcactgcaacctccacctcctaggttcaagcgattctcccacctcagcctctcaagtagctgggattagaggcacctgccaccaagcctggctaattttttgtatttttagtagagatggtgtttcaccaacatggccaacatggccaggctgtacttgaactcctgagctcaagtgatccgcccgccttggcctcccaaagtgttgggattacaggcgttgagcccagctgctgaggctttttgctatatcatacatcaaactgacttcaagtgccctgtcctcgccatcgcagccctgtcggtggacatgcaccaggtgkgtggagcagccccaggctggctgggccaggagtcacatggtgtggttctgtcaggattcgtgaacccagcagagctgttgggcttatatccactgaggggctagtgctggtctggatccaagaggtggaaggaggaagatgcaacagaaggacctggtttcgtttctgcccagaagatctcctagttttgctggggaggtggcacatctgaattgtacaaggtgattgatttttttcagcttaccatgttagtcaggtactagaatgtgaagtgctgtgctaataagccacaggaggtgcacttcagggtggctgctgcctggagaaggggagttttgagttggttcttgaagatctggtatgtggttgtaagggaaggcactaagggaggggttagcaggtgacataggtctaggacagggagtaagaggacatactttgtctgcagtgtgttgggaaataagggccctaaaatgggttcagtgagctgggccacagagtacaggggggttcctgtggcgtactctcctggggtagctttcccaccagtttagggtgtctgaaagcaaactcttgtctctctaactgtccttcaaatggcttgttcctctcagtagccacaccagcatcctctcaagcacctagacctgaaacggaagaattatcctggtgatttgttaccaagaactggtcagtcgtcctgtagtgcctttcacaggactgtgctgctggcctggatacagctgccttccctctagagttctggtaggagcttcctggccacatgttacctttaggctcttcctgcttccactggcctgcgtgccactttgtcatgaccaagttggtctctgctcagataatctcactgccttccaattatattttatagggcatgcttcatcttctcagaggttttcaaagctgcccacagcccagccctaagcctacctcgcattactctgcaagaagcctctttgctcagagattagaactgcartgttcatgagaggtcacctactcatccctttcactgaagaagtggggaaaacaaggctcagacagggtgagtaccttgaccaaggccacaaaaattagtgtccatgcaggaattggaaccaaggcccttttcatctcagttcagtggtttttttgtttttgttttgttttgtttttagagatggggtcttgttcggtcacccaggttgcagcctggaactcctgggctcaagcgatcctcctgcctcagtctcttgtgtagctgggattrcaggtgtgagccaccacacccagctcctcagttcagttcttttcttcctttattcaaactgttcttctcctttccatgccccatctcacactatcctgccccttctgttcacatcccacctatttctagaaagtttttcttgatttttatgcacttaacaataaacagttatcaaacacttactgtaggctagacactatgccagacactggggtatcagttaacaaagccgatactgtccttatcctcacagagcatacagtatagtgggggagggagaatgtaaacaaagaaaaaagttaatgtatcattacaagttatgctaagtgccaggaaggaaaatctttttttttttttttttgagacggagtctcgctctgtcacccaggctggagtgcagtggcgtgatctgggctcactgcaagctccgcctcctgggttcacgctattctcctgcctcagcctcccgagtagctgggattacaggtgcccgccaccacgcccagctaattttttgtatttatttatttatttttttagtagacacggggtttcaccgtgttagccaggatggtctcgatctcctgacctcgtgatccacccacctccgcctcccaaagtgctgggattacaggcgtgagccacctgcccggccctaggaaggaaaatcttaacagcaaatggttagtgaacacttaaactatgggtcatggcactatgggaaggactttacatgtattcattcatttaatcttcacagaactctgtgaaatagatttcccaaattttacagaggaggaaactgagacttgctaagtgacttgcccaaggtctcacagctagtaagtgtggagtcaggattggattccaggcaatccatactgttagtggctcagatactgcctctgcatcagaaaggagtgctgtgagagagaataatgggaagacctaattctctttgaggagcatggttagggaaggcctaaccatggtgagaatagtgttaacgtcattagggtgagaagaaagagaaataagccgaggatgtctttgattgtgtagtaggggtggaaggtgattttgtcggaatgggaggtgattcctagggggttgtttgatcctgtttcgtgtaggaatagaaggtggagcgctgctagggctgtgataatgaagggcaagataaagtgaaaggtaaagaaccgtgtgagggtgggactatctactgagtagcctcctcagattcattggaccagatctgttccgatgtatgggacggcggatagcaggtttgtaattactgtggcccctcagaaggatatttggcctcatnnnnnnnnnnnnnnnnnnnncgacttgggggtatgaatcttccgctcctggtggtggaaatacatgcgtaaattctagtataatatttatgtaaatgagaggcatttggtaaatatgattatcataatttaatgagtcgaaatcattcgttttgtttgaactatataccaattcggctcagtctaaccctttttataatcattcgtaggccagacttagggctaggatgatgattaataagagggacgatgtgactattagtggtaagttagttgtttgtagggctcatggcaagggtaaaaggagtgaagggtattaagaatgacttccaggctgggcgcggtggctcacgcctgtaatcctagcactttgggaggccaagacaggcagatcacgagatcaggagattgagaccatcctggctaacgtggtgaaaccccgtctctactaaaaatacaaaaaaattagccaggcgtggtggcgggcgcctgtagtcccagctacttgggaggctgaggcaggagaatggtgtaaacccgggaggcagagcttgcagtaagccaagatcgtgccactccagcctaggcaacatgactcccagatttcgggcctggaggaaaggaggaaataggtggctggaagtgatatttactgagctggggaagtgtgggagaggaatgggtttgggatgcagggatcaagatttctggtttggacactgtttaaggagtgctgtgagacatccaaatgtcaacttccagaaaatttatgtctgaattagaaagccagaggtgaggtctgggttggagataattggagaatcataggtatttatggaaaaaagccaaggtaatagatgagatgactcaagaagaaattatagtgtgagaagagaggatggctcaggacttggtccatttaggggtgagttagaagaggaggagttggcaaagacaagaaagatttgttagataaatggaaaaaggctgttggctcttgcctgtaatcccagcattttgggaggccaaggcgggagaattgcttgaggccaggagtttgaggctgcagtgagctatgattgtgctactgcactgcaacctgggtaatagagcgagaccttgtctcaaaaaaaaaaaaaaaaaagggaagaaaatcaggtcaatgtcatgtcacagaatccaaaagaagatggtgtttcaaaaggagggaagtatgaattctgctgagacaccaagtaagatgagtaccaggggatgcccattggaggaagcagcatggaggacatcagtgaccgtagcaaagttggtttcggtgggtggggcacaggacagcctggagaggaggtggagatcttatgctttatacagacctggtagtctcagacattagtctgttgtcttttctttccatttagaattcattcctagacttatacttgtttgtggtgttctttcagacttattttttaaattaaaaacattgtttttagagatggggtcttcctctgtcatctagccttgagtacagtggtgtgatcatagctcactgcagtctccaactcctgggctcaagtgatccgcctgcctcagcctcccaagtagcttggactacaggcacatgccaccatgcctggctaatttttaaaacattttttgtagagacaaggtctcgctatgttgcctaagttggtcttgaaatcctgacctcaacagtcctcccaccccaccctctcaaagtattgggattacaggcatgagccatcgttcccagcccagccttgttttgatattaattaagcatcttagagctttgatatagggcctatcaatattagagctagaaaggatggggcaactgaagcccaggggtaatgtagtttgcccagggtgacaacgaactagtggcaaagttaggacaagactaaatgcaacttagattatgaacagggtcatgtaactgtttactcatgtctctctccagctaaggtataagcagcttgaggacagagacttggattgtacctgtgtacatctcccatagtacctagcccagggttacctagttgtattttgaatgcatgagggcccatgattaggttccccatgggtgatcctagtcagtgcacttagtcccaggggaacatagtgtttcatctttttgttccctgtaggatacatacaaccctttctcaccagggacttttcctctccctcatctccttactcctagatatcgatgattcctaatggtgaccagcttatctggctgctaagttgctgtgtctgagagatgagagagggtgctctgcattgccacagggtgcttcccagaacagcagcattgattgtgcctttgttctgcatgcagtactgagacatcagagaagaaaatggctgctcatggtgtctctagtcagttgtctccaaccatgagagagactaagactggcattcagtattttagcaccacggtttcagccacccacaactacagccacaatcggatgagaatattgatgtcctgagggccagtggcagatactcgaccaaataccacactgggaggctgccacaggcctgttcgctggctatccattaggcattcatttctgtttcaagacaattctttaatctcaaattctttctttccctttccttttctgtgaccactggtccagcgttcttggctgatttttctttttctttttgttttttgagacagagtcttgctctgttgcccacgctggaatgcagtggcatgatcgtggctcactgcaaccttcacctcccaggttcacgccattctcccacctcagcctaccgagtagctgggactacaggcacccaccaccatgcccggctaatttttttttatttttagtaaagacagggtttcaccgtgttagccaggatggtctcgatctcctgacctcgtaatctgcctgccttggcctcccagcactttggccaccgcgccggccttctttttcttttttttgaatcataacttggtggtgtgctataaagaaaagctaaaatatattggcagtaatttgaggaattaattttagaaatttggatataaaaatgttgctttaaggtcattctgtacacaggtaactcttaatattgcatcatttacctgaaatgcagccaaatcagttttctttgtgacagattagagggttacaaagtattttatgaactaatgagtgtttgagtgtctattgggtatagtagctcattgttaggtgacctatgaactaacataggttgtttcattgaagcttcccagaagcctcctaaggttaggtgttcgtattcccattttgctaatggtggaaaagtcagggaagttaaagagcttgctcaaacttccagaggaagtgggcagtgggaccatcattccaaggccagatatcccaccctaaggtgactgctcttctcttaacacaagtctgtattttgaagaattgtagaataacaaaggatatggattgcagttttgtttaggaatgtcttagagctttgaatgggcaactctgctattcagaattgaatctgttctgtttaggaagaaatgtttattttggagtgcttaaaggaggcgtatgttatttgcatgttttgaagaaaaagattgccagctactgaaaggaatttgacttgtaaattgctacatggttccctatgccctaccctgaaagcattagtttataatactggattgatcaatgatcagttctaagtctgttacagattggaggtgagcatctatctagaggggaaagtcacttccagataggtctgcagagagcagctgaaaactttatttggagaagtggaactctgcatacagaagataaacatcgaagccactaaccgtatagctgtggatacagatgcatagaagagagggccattttaattctgagtttctttaaacaatttttttttgtttctttttattattttttaagagatggggtctctgttgcttagattggagtgcagcgacgtgatcgtagcttactgtagcctcaaattactgggctcaagcgatcctcctacctccgcctcctgagtagctgggactatagatgcatgccacattgcctggctaatttttttttttatttgagttgtagtcttgctctgtcacccaggctggaatgcagtggtgcgatctcagctcactgcaacctccgtctcctgggttcaagcaattctcctgcttcagcctctcaagtagctgggattacagggatgcgccaccacgctcagctaatttttgtatttttagtagcaacatggattcaccatgttggccaggctggtcttgaactcctgacctcaagtgatcccccctgccttctcaggcagggattatagatgtgagccaccatgcccacccctggcaaattttttaattttacttttttttgtggagatgggatctcactatgttgcccaggctggtcttgaattcctggcctcaagcgatcctcccatcttggcctcccaaagtgctgtgattacaggcgagagtcaccacacctggccaattcggagtttcttaaactatgattctgttatgtaagcttgtgggtgagtctcttccatttttctatgtgtttaaaactgtgagctttaaatagaagggtttaacatttataggtyactcatactccacagagatccacatccaccaggcctctcattctaataggaatgataccctcctgttaacatttgagtggcatgttcagctggtaaataaatttttttttatgattgcataatatgttttataatttggaaaacagaaaagtataaagaagaaaaatatacctgtaatctttctgctcacttaaaaacgctgtgaatgtgcatttgtgtgaatgtttatgtatgtatatatatttgggatcatattatagatatttttggtcagttgcttctttcatttcatgtatagtgaatattttcacatcagtaaaatattttacctcatgattttttgttttgttttttgagacagggtctcactgtgtcacctatgcaggattcagtagtgccatcttggctcactgcagcctctatcttctgggctcagatgatcctcctacctcagcctcctgagtagctgggactacaggcatgcgccaccacacccggctaatttttgtattttttgtagagactgggttttgccatattgcgcaggctggtcttgaactcctgggttcaagcagtccacccacctcagcctcccaaagttctgggactgtaggcatgagccactgcagctggcttaccacacgattttgaatggtgggagatatataaattattccattgaacaaaaaagccatatttaatttagccaatccctttctacggtaaccatcctcacagaagaggctttgtgagcccaccttttctaaatgctccgtattaatgctgtcagttggacacaaaagtgtcagggagctgtactgggtagttcttgctaaatatactcaggatctccatgcccattgagatcaggaatagatccagtcacctgttaaaaaagtaaatagaaatcatcacctagatagaattgatccattgaagctaaaaaatcaagcccttcaagttacttgagacagccagaaggaaaatgttatgttatagggctttgtagccaccattctcacagcttagtgcaatggtgtaggaaatattttcacagaaatatttctcttttagagagttttttcggataaagaaggcttgtttaattcaggaagagttatttcataggaaattaaatctttgtaaatcctctatcacatttccacacttgctagttctgtggcaaatgatggctttcgagtggttcaggaagggtttcctgaaagcaaacaattccatgttttatacatatttgtgtttttatttttgaattggataagtaagggacatgtactttcccctttgtatttgtctctgggtgatattgctggttctcaaactcagaatggtaattaattacttataatgattttaaaaaaaaaaatttcacttggtgaaaatgttttcttgggcccgatgaatgaccccaaagaacttttacaacacaaccagtaatgttgggcaggtgctggagagtggctgctgcttagagatcagtaattgttacatcatggtttggtatgctccgtggtgtctaatcaggtcgtgtgcttgggaaccatgaaataattctcttttcaagtcttagtgcatcattttttctgacattgatcaaagattggaaaactagtattatatttgtagccacggtattcataactgtcttacattcttaatctttcggctttttggttgaaatacatctatgcctcttaaatattgaaggcataatatcctttaacctacaactgcagagttaaaatgaattttatgtgaaatatttagttgtggaccacatcttcagctttttatatgccacagtggtcttgtttttttcccttccattgtctgatagtgaggtcattttcagtcctctgagaaattctattcccagccagatgcggctcatatattaaaagtagcacctgtggctaatatcacagcagcttaccataaatttacatggtaactaggattatatctgtcaagactgttaaaaaacatctagatttaatttgatttccagtattgtagaagctatccaacattttgcttcataactatattttaaaagttaaaaatcactccattgttaagttttatagcactcctagtgcccattaagttgatttgttcaatggaggtcagagtaaagcaacttggctacattaagatcggaaaccaacccatttgtgacaaatttagtcctttcgtgtgaatcttctcaatgtttctgcactgattggattcaggtgtagcttatgtcagtagcatttaacctcaaaagaatgagcaatctgattgggttgttgtaaattatgaagcattttgcttttgctggtttaaatgtaactgttgactctgctgcccgtgcctgactgcgccactgcatctgcctaaacaggagtggtttgggtttgaagacatcttagaaaattgggtacatgccctcatccctttccctcctttatgtgaccttcctaaactcctttattccccattatcctttgagtcatctcccacatgttacgatttgcacacctgcagttataaaattattttggggtgtcattatatcatgttgttcaccaactttccagcatttatgaatgcaataatgattcactgtaaatcaaaataatttacaagttacagagaatctgctcctacaaataagaattgaatgatgaatttctttggtgtcctctcatttgacaaagaaactgataacatatttctttgtatttgtaaaatttagctagcagtccagaatggaattaaaagtataagttcaactttctggaaattttgtgttttaaaacatgttaaaaaatataaaccagttaagaaataagcaaagtctgtttcctcattaatagttgcaattggcttggcagtcatcttgctcctgaatgagacagttgtcatgttaagtgttggcgccgaggctagggcagcgtgcgtagccctgagtggaaatgcctgctttaagctggaactcagtgtggaggttctttctgctctgttgatctttctggagggaagttgtaagcttctttggcctgggtctcactaaggaagtggaacggcagccaagaattattatgctgaaaatgttgtggtgatagaaaaaagatgattagaagtgaggctaaaattataatttaatatgttaccaagtgtaattagtcacttaacagtataagaaaataccattaataactgatgtggaaccttgtaaaatatttcttggcgaattttaatgtcttttttgtgtacttaggatcagttgagccccgtgggtaacttgggtgccctgtttgtgaccctggcttgctgtgcaggttccccttggacatctgtggagaggaagagtaagaaggagatggctgtgcccagccccggcctctcacacagccttctggattgttttacctctgctccttcactccttaatagctctctgtggttaacctttctgtcctcctcagtcgcactggacgctccttgaggaacgggagctgtgaccagggccagagcccaggaaggtgctgggtacagagcagcagattggtaactgtttatatcacatgctttcaggarcagactgttgggaagattctgggatttccagacatgttaaaggtttcagatcctgtgtggaaagcagaaacgtaagaaactgataacttgttttgctgaccatgatcctttttctcttcaggtcatccattgcagtatgattttgtttctaaaggtatcagttaatgttctgaaggggacaggattcatgacatgctggtgataaggctgcttgccaggtagctacctttaagatccccgaatttagcctaaaagggcccaggagctgcatctgtccagtggccaaagacagaaccttagaaggttgattttgagaatagaagacctgcttgttttcagggagaagcattatttctctcttcaactcagagatgagttaaatcctaaaatgatcattgaagtgcacattgccagattttgtcactcattagtgccctattaccttaggtataggaaaaatggctataatttaaaaccaaatgagccaattttatagcactaaataggtataaactacttctgtgtgcattgacttaaaaggcaatgtttagcttggttctttcataattaacattccatgttgaaaaataaaaactggtattgactttatttttatttagaatttcgttttaagctatgtaaaatagtattgcatatttgttttttcagatttcagattataatacataagtaaagcatttatttcttctaatgaaatccttatttagcaaattttggctattataataatatggttactattggatgaacagatatatccattttacatgaaaatatttttttcattccatctacagatatttctttttaaaatacatgcaacttttcccttactaaaaaagatgaattttatttgagaaatcagttactttggtattctgagactaggttataaatctaatattgcagtgttttaggactataattaagaataggttctgctggtaaatgttggaaagaggcaaagaagaaagttacaatacattgcctatttaccaattaaccattacctgccaaaagcacatcagactcacacagcggacatccgctaatccagtggttagctgttccgggctctaatgcacactgttttacacgttaacggttttgaagttccaggccaaagctgacctttcacatgtgctccgttcacagtaggaatctccactcactgcttcctgtcagaatggattatggtgacacagcccagggcccactttggctgcaattaagtttttgatcagaattatttcgttcacaaacaatcacatttgttaaaatgttacatctgccctgagaaccactggcagactctcagtttatcagtctgatgcaagcgtaagtcttcatttgtttttcataaaatggcaaaccatcttatacatgttatttaattttatttttttcttttgttggtttctgcctttcatttcattgggcttggaaggaaactgtgtcttgaaattagtctgaagccgcttgaagactttgggaatttgaatggaattgcttttggtgcagaacaaaattatccagttgggagccaagactcaaatattatttccaaaaattgttagtggtggttctgtttctcacacgaggaaacgttttagccttgtgagtgtggggcttgaagctctgcttcttggtctgcagtgcctgtagctgccatgcctacgatgtcgctgccttttggtatttatcataaggcatgtctccagatccgtcattgttgccatcgactttggtgccagaagtgaaaccagtcctgcttcagtagacttgcctctcatgcctctttgcctcccttttagaagtcattttctcactaaggaacagcagcagagacactgaaggaaccttttctctgaatgaccattttttgtttataaaatgatgtgggtattgatggaacttctgaattttatagctgattttcaccatatgacgagggtgtcctctcacccttttgtgaccttcctattctggagaagagtctgtgtgcttgggagctttatgtgttgggtggggtactttgggaacacaggattagagtttggattagagtttgacttagaatggaaattaacctttgacttaattgtgtgtgagagtggagaagggggaggggatagagttaggaggctgtgaagttaggaatgcttgaatgctgtctgagaggtttagaaattttaattactttaaaaaatatatacttagaatactgttaaaggaatttttaccaggttttaaaatattgcattaaaactcaaactatttcccatttgttttgacgtaaccaaactcatttattactaactcataaagttacaaggggcaaaagaaaggtgttgtacaaaaaaccattttagccataattttttaagcttttaaataaagcagggcctagctgcacatctaaaatccaaagactttacttaaatgggataatgtaagtactggttatattaatatagccttcatattgtcagatttgtgagcacgcataaatctgttttcttaaatgtattattataattgttttttactcttttaaaaatcatgtttggaatatacctgactatacttactatttaaaggaaatatatttaaagaaaatattgaatagtatattttgaaagaaaaccccaacatgtaaccttccaaaaatagacattcctaaggtactgtcatcattcagtaccgtcctgtcttcttaaaaagtggtacacagacagaaggtgcagaatttgtatcttattacaagctcatgttaatgtagtcattttttattttcaggttttgatgttttgttgtttttttttttttgagattctgaagtttttagaagtttgtatttataactttttaagcccatgtaatgcatatggggcatctgctgggccataggaggaatcttcacttttggagggtgtttttagggaaatcggaagcagtcaggagaaagaatggtgcatagtgcccctgtctgttcaaaaaaaccagaggctcctaaaatcctgtgtagcatctaccatgtacagacaacctccattcttaaaactttaaatgcatctaaggaagggacagccttctgcctgcaatgagcaacagcttcacatgagacacccaagaaggttcaaaaatactctttctggaaaggctgatacagacatctgtgacttggggtctgcctcacagtatatgaaactgaaagatagattggacacttaactaccttaaagttttactagagcttgtaaagacacttccgaggtcccaaagaggtcctttatgccagacagagccctctagattctttcccaaccaccatgaaaaaccagccctctcttcctaaacaatgtaattgctggcataaggagacccccactctgtaataagaaatttttttttttttttaaatcaccaggaacatggcacttttttccttatgttggccatcaggtcacacagcgggaagaacacctatcattggtccacccacttcttcccattatgggaaggctgaggctgagagggagaagtaactctcccaggcgaaagagctagacctgcacccaggtacaccttcctttctctatctgtggacttctggtgtcacaggactatttgagtaattttccattatactctgcatggcccagagagatttaaagttaaagcagagtaccacttttgtaaataaaatgaaatcaaactctaacaattgtaaggcatgattttccaagcctccggggtttagggcaagtaactgctgccgtccctgccggctccaaccctgttggtctcctgaggcctggttctctgggttgtacatttcttttagaaccaccccagtttatttctgaccttgtgcccacatcccatagtcatggtgcagcatatatatttttttttttaataaccctggatgtgcaggtggtcatatttcctaaggtttcaataaagaatgtatctcagaacaccagggtaggaatggctcttaagtttgcactgggtgcttgaggtaagattaggcagacccagagggtagtggagactttgaccttatcatgaaactctttaaatatcataattttgaaaacataagatatgaggtatttcagagcagtactctattctctaggcactaaagatagaagtgaatgragctcttttttcctgacttctcagcctcctcacaatcccttggtgagtggccctcttttggacaagtgcaggggctgagtgtggaggttgagtgtcatgtccacagacacatgtgacaggaagaagtattttgagcataagaacttggttcctggccgggcatggtggttcacgcctgtaatcccagcactttggaaggccgaggaaggtggatcatgaggtcgagaccatcctggccaacacggtgaaatcccgtctctactaaaagtacaaaaattagcgtggtggcgcatgcctgtaatcccagctactccggaggctgaggcaggagaatcgcttgaaccagggagttggaggttgcagtgagccaagatcacgccactgcactcgagcctgggcaatagagcgagagtccatctcaaggaaaaaaaaaaaaaaaaaaaaaagaacttggttcctgagaagtctactttgaggatctttccacagcacacactgcctgcaccttggaggatttgatgatgatatccttgccatttcagttttggtaggtagattatttgttctgacaggtttaattgtcattgttttggcacactagactgttaatacctgaattaattggttgctttaataggtgttcagctaaaagaggacttcatcatattatctaatgtttccactgggagttgaaaaaagggattttaaaaaactttttcatttattccataaatccccaagtatagaattgctcttctaattttgcccctgaaactgcaatgtatgttgatagagagttcaaagatctttatattcagaaggcctggcttttaaaagatatatttggtatacatgtctctcttctacatgaaaccataaaatggtttctaaaagagacagttactcgctgtatgtgagactgtgaagcttctaaaaataagtaaagaaaaccatggtgccacatggagaatgagtcggatgttttaatagtatttagtgattcaggatacacaattaaatgaatattataacagttttggaaaaaagggcacagggaaaaaaactacgtaataattttttctttttctaaaacctgttatactttatctcttgtaattaaatttaaaaaataagattatgggggctgggtgtggtggctcacgcctgtaatcccagcactttgggaggccggggcgggtggatcacgaggtcaggagattgagaccatcctggctaacacggtgaaagcccgtctctactaaaaaagtaccaaaaaaaaaaaaaagttagccgggcgtggtggcgggtgcctgtagtcccagctacttgggggggctgaggcaggagaatggcgtgaacccgggaggcggagcttgcagtgagccaagatcatgccactgcactccagcctgggcaatagagcaaggctctgtctcaaaaaaaaaaaaaaaaaaaagattgtaggaaacttatttttgctaaaatttacttttaagtaaaagaaaaaaaaaatggaaaaagtataatctgacatcagggatttgtacctaaagatgcacacatggaggctttggagctggacataggggacttgaatttgcatcccagcctcactttttatgaggtgcgtgactttgggcaagtgatttaacccctcagagcctcagttctcttctctgtaaaataggaatgataaacctgttcacagggctgcagtaagtacctggtccagagtagttattttataaatgctcattatattttcccctcctcttcttcatcctagaactgaatgatgagaatcagtggtcagagtaatgactctgagatacactcagatccatagtcagcaagaatcaagttatgttcagaaggtactacttgatcagaaaagaggctattcaggtattgccattgagatgatgaaaataaaaaagtaatttatgattaataccaaaatagaaggtaatcagagatatcctgttccttgtgtatactagatgataatattattagttttaaatttgaacattactgtgtatgtgagggcactgtgctgtgtgattggttcatatcatctcatcttacctagatgggaaatgcagcccagccaagtcatacagcctgcttaaggtctgggttgagagcccaggttttggattcctggtctgatgctctttccatcatattgcattgtttctgataaagtaaatgtatttttaaaatgtcttattcctttgcaaatcaaatacataaataaagtaactatcatttattaatttccttattgatggacatttagagtctttctcatggttttagtacggtcagttctgtaacaagcatcctatgtctccttgtgcataagtgtaagagtttccatacagcataaatctagaaatggaattgctgggataacttctggtacatggattaataaaaatgaaaaaccaggattatgagaaggtctgggcttgatgacattcacattatagcccagggacaggctgtttgtcatcagaaaaccccttccattcatgaggccatagaaatccatggtgaccgaagcacttgtgacttcggagcagtgtgatctgattttgaagtggttttgaaaactggggacggtatacataaggtgcaaagatcacggaaacatgaattagcaagtggggcctcagtctaggttacgagtgctttaggacaaaaaataatcacttttaaggaaaagtcactgttgatagcactcagaatgccaccagtattgcagatttgtaatctattactttaaacttttacaaatgctcatggtgtaaagttcagacccaagttactgaatgtctgttgcctgaaaaggatacttcaaaattatattttccctttaatttcctgaatcaaaaggctccaggttgtgacagaaatgtcactacttgctgtctccattcctgtacagagacccacaagagactgaaaaatggtgttggtcaagttgtcttgggttctgtgccttctgggaccggtaggaatgcagtgtggactgcagtggagctggggttggggagcaaatgcctggtctgctagtactgtctcatccacttgtgttttagtaatctcattgctttcagtggagggatcctattttacactgatctttatgagcaaagataattatatatatttgcctgggtaagcaaattaataaacttgtaacaaagtgtatcagaccatttctttggcaagacctactagaacagtttgtgaagcagagctgcttccaatggagcatgaaaagctttgaaaattctcagcaacagcagaaagcaacatttgaaaccacccttaaaaaattgttttcctcttccccaaccaagtttataaaaatttggtcagacaggcgttttgttttgatttaaaatattttcagtgaattgttatctgccgaatgcacatgtgttcctgcactttttctttcatgattgaaactttaaacccttcccttaagttcccctaaaaacctccctgtgcctagtaaggttttgcatgtgtgaggagggtgaaggtatttggaccttggagaaactttgcaatttgaaatctgcctatgcagttgtacaccagaaatgaacatggtcaatgccatattgtgctctttgtctttttcttctaccaagattcctcacccctaggagacgttggttaatataggcatttcggtttggttaatctgatcatgagtgcccgtgagcatggcatgaggcatgattgaagcagttataaaaatttggctcagagttaagccctataatttgttttaaagaattacctcttcagtgacattaaaaaaaaaaacacaacaacccaaaaacaacaaccaaaagactgtggtttataacaccacacctggtccagattgtactggatgaatccatatttgctttgccataaatgattttgagggtggaattcttggactgttttctatcttataaacccttgacattgtactggtacctgtatgctcacaaacctcctgacatgggaaagaccggctcagcctcccactgaaatgtaggttggctgcatttattctgcatgttcctagaatgaggaaatgatatgacaataaacagaaatgcccttgctgaagagagaagggaagctggtgtttatctggtcaggtggtttagattagctgtgatgcagctttgtattatgttactttaaatcattgtgtcccaacaggacataaattatgaagattgttacagtatgtttcatcctatgtaagatcaacaaattggaataattttttataggaaaatcacagtgcttttggcaaggctattgaagcctttaatttgacttgagtatgtctcaaatattattgcttaatatataaagtatgatttgcataaggtatgaaataataaacttgtaaaaacaaaagggaagaatttccctgtagcagttgcatcaaatggcagtgcactcctcctccagcagtgtgctttttttgccctgatggtttagagccagttgcatgactttcctctgatgggattgcaaatgagctgagcagtctttgcagagatggagctttgctgtgtgctgcgtgcctgtcaaccctacctgcacagagaaggtgattgctccgtggcagaacagaatgggagcctgctctgaggaggagaaaacaaatgatcttgtttatatacactcaggaaaacaaaccatttttctttctttcaggatattgtgaattacttatataaaaaaagccaacctctccagaaacttcctagatcaacagctgaagttaagataatttatatagaaatgcggaaaaatttgacttaagaatttattattttaaatgttttctctcttcattgctattttctgaattactagcataatttgtgaatttttgacacagagacttaaaatttttcatttatattcaagattcagctaagtttggctacacagaacaaattttctagattttaaaaaagtggcataaaattactttatgtatgattccagcaaattggaaccgcttcagtgtcccaaagaagcacattttctgcgcaaagcactgtgcatttttgtgagacctcctcacacccagtagtgatgttaagaagtaacagagcctcagatttacagagtagtagaggcaagagaggtttaggatttgctgaaggccatagaatgagacatagctaggattagcatttttcaggatataaggataccacccaccagactttgtctttgataccaaaaatagggtttaagtgctaagcttactttcctttctttgtggctataagccctggtatttttctttaacaaataattaaaattattattaaataaataaatatacttaaataagattgtttaaaacaaaaacaaaaaatccctactttccatctataagggtaggaatgtttctctccttaagcctacccttataggttgggtaggcttaaggagagaaaaataacaggttaaggataaatcctgaatatatttgtggtttccttcagctcgatgtctgaagattctcacaggttcagggactattccaagtttgcaacctgtgtgtggattttgaaacaaatacagacaacttatgagacggtttctttgctgggcttcttgcttgacacagttttctgaaacatggctctggcaggcttttttcttccatggacacattgctgccgtttatcactgaagttcctctgtggagttaccaggagctaatatttggatgatgtacttttcttgcagaaaatattagcaaatgttgcagaaactgtgctttaaaaacttttaaaaggggaatggattcccagtttaaaaataagcaaaagaaaggataaacatgatttcattgatggtgtgcaactgctttagaacatcagatattttgtgatgtgaaatgggatgatactctattttacaaaatgtgtactgcttatagaaaatgtatttactgtaccactaagccaaacttaggtgttgctttgtttccttaaaatattttttgagtcgctgtggctgccccacagatgatgggggagtaggcattctttctgcccagagcacttgttctcttcctccacccttttggttgttattgtagcatcttgactttcagcttaacacatcccaacttaagcagaagcccttttgccttctctctctttaaaactagatccatagaaattatttttattacagtaatagggcaagatagttttatgtcatatataaactggaattatgtagtgttagtagtagttatgtctcctgaaaggaaccagttgattataaagaagaaaagttagggagtagactgtcattttgcatgctattaaaaaaaaaaattttttttttttttgagatggagttttgctcttgttgcccaggctggagtgccatagtgcgataatggctcattgcaatccctgcctcctgggttcaagcgattatcctgcctcagcctcccgagtagctgggattacaggcatgtgccaccacacttggctaattttgtgtttttagtagagacggggtttactccatgttggtcaggctggtctcaaacccctgacctcaggtaatctgcctgccttggtctcccaaagtgctggggttacagccatcgcgcccggcctcaattttttttttttttttttttttgagacggagtctcgctctgtcacccaggctggagtgcagtggcgcagtcttggctcactgcaagctcctgggttcatgccattctcctgcctcagcctcccgagtaggtggcactacaggtgcccactaccacgcctggctaattttttgtatttttagtagagacagggtttcaccatgttagccaggattgtcttgatctcctgaccttatgatccacccgcctcggcctcccaaagtgctgagattacagatgtgagccaccgcgctcggccccctgacctcaatttttaaaaatatatttgggcaggtactttgtgtatcttagtggttcggaagcacaaagttgaagcctatgaagtcgttttttttttatataaagtagaatttcttataattttataatgatgacagtaccaaggagcttaaatacaatttttaaaaggattgctaaaacaaaactaactaaactttggtaatctttgcaatacctctcacctcataagactctgaaagccaacaaataaggattatcagcagattagggaagaaaacctccaacaggacttttctgaggcagctgattggcaataatgaacagccccagtgaattgcaaagcatcacaagttattttgacaccagggaactctggtaaggggcttctcttggggtggttttaaaaccagtgcttctgtttgctttaggagaaaagaatgggtagaaaactggtgaaatgtgctaattcaaaactgaaagattgtgagaaatttaagaaagagctaatcagactgggcaattggtctgcccaatagtagctgatgaagatatggcgaaatgaatttaaacttaggtgcagaggaatttggaaaccggtagtgtctcttcagggaaaagatactcatagctagtgatcaccttggccagaatgtctttttggtatacatcagctgtgtgaactctatctagttagagaactttcactaaaaatgaaacagaaatgaagggccttttggtaaaatcgtgtgtagagtttttttttgtggatgtaaaccctgccacctggagaatagtggatttatattaatatactcctatctaagaggagttttcctagcctgggaattcagtagaaatttactgatgtattgaaagtcctaattctgcaaaagaaagttgttttgcaccttgcttttcatttaacagtatatgttgaagatggtaccatgtcattagctaaagagttgccatattttttcaattggctgtgtaggctattatggcaattgccaagaatagtgacttgaagcttttttttttttttttaaaaggctctaaaatgctacagtatgaaaacagcttttgaaagcagtgtttagaagtgagcatgctatctcacaggtgttgacctgttcagtgacatttaaaaaatgtacttattaccatgagctaagggggactcatttcgtctggggcctggaagagcaggcagctttttcagtagcttgtggatgttgtcttcagtgcctggagaagccagttttaatttcatagttggatattcttggcctgagttattggaaatgttgagctctgtggcggatcaagtagatggcaagtagactagtggcttaggattggtgggagttgtgtctgcccccagacacacaagggactgcacagggaatggtcctcaagcaggcctttagccccacttcctcagggagacatgagtcacctgcttggctgagatgctcgctgacagattgccagttccgcaaggaaatcttcccgtgccgacacccactcagagaaacagtgctaaagatgtttctggttttctgagccttgtaaaggtgaatttctttggccttcaaattggtcttctgctaggtttggaaaggaattcttcctttccaggccacagacactataatatcaaagtgttattgatgatgataataatcactagcattaactgagttcttaatagagtgccaggcatactgtaaagtatattacatgaattagctccttttacgtatggggaaactgaaactcgtttcaaaagttaagtaacttttctgaggtcatatagctagtgaatagcagagctaggaactgaacttagttgaccagtgtgctaaaaatatgtctgacagtccagagaaaaaaagcatggattaaatacatctttggttggatctgttcctcacagtttagttgagaatattcttgtgttgcctacaattaaaatctgacgtttcctttgcagcggctagaacagttaacagtgttccacgtgaaagtcttggtgagacatgtaatcatgttctgtggcaaagaatgcctttacttggtgcactagacagtgtttatgtgattgataagtcaccaacaccaggggaaggtcctgtcctgtgacatgtgcgtgcttggcaatgatcttgccttgcattttgcttaataattttcattatttttaattaaagttgaagaagtgcagactctagctgaaattaaggtaggttgtgttgccggaatctggtaattactttaattgatcacaagatagtttccttgatcaccaattagagtaaattgctgatcatgtttcaagacgtgaagaaatgcccaaactgatttatgtaatagtgttttcatttgtaatcagacataaatatcatttccttccatagcaattgtgttttataaaagaagggttataggcctacaaacataatggtgattcataaacaatagatgtctaattcattgaattagtaaaggaagtatttagaggcttaatggagattgtactggggaaattactttggagtagctggtgctcattttcttagtgggagatatgttcttttttagtgcataattaaaatagtctataatcaaaatataaaaggcagctgatttaaagaatgtatatcaaagagacttgctctgagtaacgaaagatttgtattgtaagtatgtgctagaagtcttagaactttaataaatcatacatgttatttgactgaagctgtattttaaattcagggtgctgttaaacatttcacagattgatgcacgatttttgtcttggttttgtgcatctgatagtctttcatagtttcatggaataaaatgaaacaaaaggaactttaagaaaaattaaagttcccaaagaatacttgatttggggttcatggaaaaatctttaattgctgatggtttggagatttccaaatgacaaacttcattggcccaatttactgtgattgtattgcttacattccttaaaatggtagagtaacttaaaaagtcatacttcatcatacattcattgacttgttcataaaatgtttgtaatttgcaatagaggaaagactgaaactattatcagccattatacgttatttgttggccatatgtttgtttgaaatggctgtggctcaacagaacatggctcatagacaaactatgctgtaaattggcactaaaaacccacctaaacaggtaggcatatgttaagaagttaacatgagccaaaatattttaatgtgaaccaggttatgtacattaaaggattccagctccctttacagtgggaacttcatttgcatgttgttcatttttttcccaaactaatttttaaaaaatagatcaggtatacacatggtacgaattcaaaaggtaccaaagaatgtaggaagtcttcctgtttgtgattctcaaccatccagttcccactctccactctcctcatctttcaccattgctcccatcattcttgtatatccttccagagatattaatgcatacacaagcatataatttcttttctttcctttttatatgcttcatgaactattgttatgcatatattttttttcatttagtaatgtatcttagaggtacttccatgtcagaggataaatggtttccttgttctgcttaatggctgcatagtattccagtgtgtaaatgtaccataatctttctaatcagttccctgttgatggagattttgctgtttcaagtctatagctattacaggcagtgctgcaattacctttcttgtaatttatgagtatgtctgcagcacaaattcctagaagtattgtttggtctaaaggcatggacattttcagttttgacagataatgtcagattgccttccatgatgatgatatcaacttatattcaccagcagcatgtgagaataccttttcttctatatcctcaccaacagaatattagcaaatattttgatctttttcaagctaataggtttaacttagtttttaatttgtatttaccatgattgagattgagcagtttttatgtttcagaaccatttgaatttcttttctgttatctattatgtcctttgctcatttaaaaaatggtggttggtctcattaatatgtaggagctttttatatgctaaggaagtatatactgcaaatataatttgttgtttatcttttgcttttgtttgttggattttattaccatacagaaaaaattttttttgcctgtcttcttcctgcagtacagaaaaaaatttttcgtgtagtaagatttatctatttcttagtagtagttttttaaagttttcaggaaatagaatttataaatttcttgttaagttactcttagattgtttttcggtgccattttaaatgatatcttttcttcggtatattttctaattggttattgtttgtatgagaagctgttgactttttttttttttttgtcttattcttgactttaatgggaattctagcatttccctataaagaatgatgctaagaaaaatgatgctgcctttggactgagaatatattctatcgtattaaggaaggatgcatctattcctatctatcagcattccagagaatgttttcagtactatttctactttttggaattgattgagattttctttgtggactaatatatgtttaatttctgtgaatatttgatgagcgctttaaaagtgttattctcagtttttagagtttaaagtatagcaattagctctacctttaaaattatgtttgtttgtttaatctgtcatgggttaagagatgtaagttaggctaagtgcagtggcgcatgcctgtaatcctgccacttacaggtttagaggctgaggtgggaagattacttgaggccaggagttcaagaccaggctgggcaacataacaagaccccatttctacaaaaatttaaaaaaattagccaggcataatggcacttgcctgtagtcctagctacttgggaggctgagataggatggatcccgtgagcccaggagttcaaggttgcagtaagctatattcgtgccactgcattccaacctgggagatagagcgagaccctgtctcttaaaaaaaaaaaaaaaagttaattaaagtctccaactataaatgtttctatttattcctatatttcctacatgggcttattcaatgccatgttattatttgtagtgtagatatttgtaattatttaatcttcattggtggatgcaaatttataaatgcaaattacccgcttcaggacttttaatgttttgccctaaattagcctgttcaatataatttattaacaagtttttttttttgcatttgcttatgtgcttttatttttaatgattgaattttgctttgtgatccagcgtgaaagttttctctttattttgattggttggatttatgttctttacatttattgattgcacagatgagtttagtcttataaaacatggcagaaccaaaatacttttttcttccttattttaaattatgatatggactgtgttttctttgtttcattttaattatgtttttctttacttaactgggaatgtttatatttttattttgattcttgtggatactattataactatatataggtatataacttgatagtaccttatggataatatagtatatcgtatatatatataatacctatatatagtattatatacatatatatgtactattatacctatgtatggtatctacaagatcctataaaattatatacctataattttacatagaaaatatagtcttctatttctggctgggcattgtggctcacacctgtaatcgcggcactttggaaggccgaggcgggcggatcacttgaggtcaggagttcaagaccagctgggccaacatggcgaaatcctgtctctactaaaaatacaaaaacaaaaattagccgggtgtggtggcacgtgcctatagtcctagctacttgggaggctgaggcaggagaattgcttgaacctgggaggcggaggttgcagtgagctgagattgtgccactgcactccagcctgggcgacagagtgagactccatcttaataacaacaacaaaaaaagaaaatatagtcttctatttctttatatagcatttatggtcccccctcaaagcaatattgaaataatattttctcctactttttgttcactgtttaattttagtttatattatttttcagtcctagtgcttatgtttaattaattaattaatcagatacagagtcttgctctgtcacccaggttggcgtgcagtggagtatgatcatagctcactgcagcctcagattcctgggctcgacggatcccccaacctcaacctcctgagtagctaggactacaggtgcatgccaccatgcccagctaatttttaaaattttttttgtagagatagggtctcactatgtttcccaagctggtcttgagcttctagcctcaagcagttcttcaaccttggattcccaaagcgctgggattacaggcatgaaccattgtgcccagccttagtacttaagttttacacatttaagtatacttatgtctctaacttgatctttcatctttcaaagattttgtttacttttatataccttcttcatcttgtcctttctcttttaaactcctttaatagtttataacatttgcattccattctgtaactgtaattcccacagttgttttaaatgtattcctagaactgaatgaatatattgcttactgctaatacctttggtatagtttctccattcatctcttagttacttatagttcatcctttaatagtttcctcaagaaggatgagtgataattattccctgacttattgtatttctaaaatgtctgtcttttgcatttatttttgaaaagtagcttagctgggtataaaattcctggttttcaactttcatttcttaaagtttttgtaggtattgcccctctgacttctaatgttgaatgttggtatgtgaatgtttgaagtcagcagaatctttttttttttttgagacagggttttgctctgtcacccaggctggagtgcagtggtgcgatcttggctcactgcaacctctgcctcctgggttccagtgattctcctgcctcagcctcctgagtagctgggagtacaggtgcgcactgccacatccagctaatttttgtatttttagtagagatggggtttctccatgttggccaggctggtctctaactcctgacctcaagtgatgcgcctgcctcggcttcccaaagtgctgggattacaggtgtgagccactgtgtctggccagattcttttcatccttattgatgaattgatctttttgattagatgccaaaaggattttttaatcttccgagtttaactttgctacagwatatatatatatatatgattgaaatattacaatttatagatttaaaccctttatttttggaaaacttattttttttttaaatttttatccccaagtgttctgagtcatagaaagttttcttaaattacactctaattttgggggtttcgtatttttgttcagttaaatagcaacaatggtttttttttttttttttgagatggagtcttgctctgtcgtcaggctggagtgcagtggtgcgatcttggctcactgcaacctctgcctcctgggttcaagtgattctcctgcctcaacctcccgagtagctgggactacaggcacacgccaccatgcccagccaatttttgtatttttagtagaaatggggtttcaccatgttggccaggatggtctcgatctcttgacctcaggtgatctgcctgcctctgcctccaaaagtgctgggataacaggcatgagccaccacgcccagccaacaatgatctttatgttagatctcctttgtttgtccttacatttattcttttctagttcttctaaactcttgttgatttctatttcattttgcccattttctggatcctgtcctcttgggtctcttactgggttgttagtggtgtctattctgcttctggctgtttctagctttcctgtcttttagttagctcaaagcctttgagctggaatcccataagcaagtaactaagactgtaaaaagaaatctttgaaagaaggagcagatgcttttcaccatctgctaagtcagctgtttggcattgtatcttcttcattgtattccagataatcaaactttcgtttgagttttgccttttttctctcttattcagtcatctaaattccttggagtagttctttgagtgtatattttgaaagaagtttttaatttgtggatttaaaaatacatattttggggattggttggttctgttatatggaagaaggattatggaattgtctttttgcttccagagcagattattattttccccggggaagaattaagaataaatcctgtgtaaatggtttatcaggctttgtagtattttattaaatgcaaatattatgtgacagttgaagggaaatatgcaaagctgagaaaaatacaaatttgaggggttttgatgtgtcataaaagttttttaattgtatgtagatatggtagatgttttttctttgatcagtatgcctcttaggctgtggctgtgtttcctttcaagccttatatctgtgatggaatagattttgctactatactgatggcatgccagtggtcaaagatttgaggaccacttctgtgttccgatcatccacttgatccacttggctaatgggaaatggcaaggaattgtaggcatcactttagacattttagaatgacatggttcaaagaaattgtggccacagggtgtaagaacttgggcagtgactgtgcactcataatttcttgccattaagctgctttccccagtcagtgtgcatcaggatgttaccccacaatgtattatctgttcgtttgctctacatgtgcgagtctctatttatgacaactggaaaaaggaaagagccattcttctggaagacagcaactagaatcttagattctcaagcccatggagagcttttcaccactcattgtgttttgtaaggtttaccttgtgtagtttggtcagaagcagtagtgacagcagtatgtgccattaccgatctcttattctgtaccaagtgctgtgctaagtacctttatataccttatctcattgtttattagaatgtaatcacatgacttttaaaattattgtctccattttactgataagaaaactgagagggccaggcatggtggctcacgcctatattcccagcactttgggaggctgagacaggtggatcatgaggtcaggagttcaagaccagcctggccaagatagtgaaaccctgtctctgctaaaactacaaaaattagccaggcgtggtggcaggtgcctgtaatcccagctgctcaggatgctgaggagaatcgcttcaatccgggatgcaaaggctgccgtgagccaagataatcccactgcactccagcctgggcagcagagtgagactctgtctcaaaaagaaaaaagaaaactgagactgatagttaaattgcatgataattaagtgatagaatcaggatttgaatccaggactccctggctcaaaaggccatgcccttaacaattgcattgctgtctatcagtgatgttgattagcattgtacatcttctaatgctaaacaagaataaggcattataggcagagtagaaattctccttatacgtagtttaatgtgggttaactctatgtttgaataattagaacagactttcatggctgggcatggtggcatgcacctgtagtcccagctccttgggaggctgaggcaggaggatcccttgagtgatcccttgagctcaggaggttgaggctacagtgatctatgattgtgcctgtgaacagcccctgcattccaccagcctgggcaacatagtgagaccctgtctctataaaaataaaaaacaggcttttgtcccttcccttcacataatctagacaatcagattatgagatgagaagggctgggaaagtgaatattgtttttccacagataattccatacatggtcaaatggattttgcttgaactttctcccttttcctatagggaaaaccttcaggcctcaaatgtcaacatggaaacttttatcccaaataaaattggctccgagagaggtaccatagtgaatgatatagaattgtttaaaatggcatcttctgtatttctcactgttaactaggaaatacacacttaggtcatttggtgatcccaaaaacatggcttgactaacatcatattggtttttctggataggggtaatgaagttaaatatttgtttacgtgggtgtaatgggtattgccctgtgaatgccactctaactttgtaattcatgtgccattaccctaagagtcttaccaagtatttgtgcattctggaacaatagagacagactctcctattgtttgcagttaccttcataaaaaattgaaaacaaacaaaaaaatgagttttttccttcttctgaagacaagtttaccttctgcttaacaaaattgtttccactccccgtgtggtataaagacagagccccgtcagtccacacttagtcgtgtgactggtttgcagccctctgctcatttcctggcttgccttctgccctgaggtgggtgcactgtcaccttgaaatggcagtgcagggcagtagcaggaagaacccaagcaggcaagctgggcttctgtttcactctaggtgccaatagtctttgatttgttcctgtcctgcctgggaggtgagatgaagaagttgttcatttctgctggtgcttttgcttaagacaccctcaggagacctttttccatagtcttgtgggttgccttagttagcaacccaatcactaaaaacaaaaggaacagagctgcaagaaaagtggctcctaatatttggagccaggtagtgagacccagagcactgggttgaagggaaattattcccgtgctattttgtagagtcttgtcctgaggacaattaaatagtccagacgggtcactaggtgagaccaatttcctggtttgtttactcgagcctgatagtttttcaccatccagcagtaggtcacagtcctgctgcactgtgaccccagaggcctgcagagagcagtcctttcatagttgatttccacaggcttccctaaggatccttgcctgcctttatgtggttggattgctctgttgtgtctctcaggcttagggtagaggacaatgtcagtaattactcttgacttcatcttatgcaggcatttggctttatgtcccgagttgccctacaagcagagaagatgaatcatcacccagaatggttcaatgtatacaacaaggtaactaaactgccttatttgggaatcaccttaattatggagtttaagaaacttctttcttccttgtcatcttgtgcagctaaatgtcattgtacttaagaaagtcttatcctttctctcagaatccctgtgtattattgcaaattagtaacacattttcaggtctgctcctaagaacagtgaataagctctttattttcatgcttgtctttctactgaagctaatatgagaaarttgggccaaatgaggctcctgaattaaaccggagtatcagccatgcagatacgtttcaaaacttaaggtaaattattgaaagaaatggtagcaaatcagatagatatggcctcatttatctcgttgaaatatttttactcaagaactgtgctttgaaaactattaaattttgtatcctgcgtaggaaatgaccttatttaagacaaaggacagactaaaaagttttgagggaacacagtgagaagaaccttgttcctcccaaagtgtccttgcctttatggtcatgccatttgaaatgtcttatcatctagatttctatgaagtcttctctgtgaaaatctttgaaaaaagagaatttcacaatactcacgtgacttaatagaataactcagagcaccttggtaccaggctaaacttttctttgctatttgcttctctttgctcgtaattttgcttttactttataatcagttcatcaagaaacagcattccatcctttactcccatttccctaatttagaaatgtgctttttttttttttttttttttttttgagttggagtctggctctgttgcccaggctggagtgcagtgctgcgatctcagctcactgcagcctccacctcccgggttcaagcgattctgctgcctcagcctcccgagtagctgggatcacaggcgtgcagggtaacttttatatttttagtagatacggggtttcaccatgttggccagggtggtctcaaactcctgaactcaggtgatccggcctcccaaagtgctgagattacaggtgtgagccaccatgcccagccaaaatgtgctttttaaacgttgctgctaagatattacatttgatagcttggtttttctcagtggcctgaaaatagttgatgtaattaaagtaacgagagttcaattggaacctcagtctctctttttatttaaagaaacaagatttgagattctggcagctgcattgcctcttcatggaagagaactttttatttcaaggtggctgttgagccaggcctaatgtagactatgcccctggagttcgctgggttttggaaatgttttgcttattcataatgtagtattttctaaatcatttaatccccctaattctcaaatatgaatgttgaataatagactgatttctgaactgcmaaaggaaaataaccatgatttgctgctcagagttttaaaaactgcttttctttttcttaggtccagataactctcacctcacatgactgtggtgaactgaccaaaaaagatgtgaagctggccaagtttattgaaaaagcagctgcttctgtgtgatttcttccaaaatacatgtaaaatcttgtacacatcttagctgcaatgtatgttgaaggaaatttatgtgaacaaatagagttgttctttttctcttttttttaagacagagtgttgctctgtcgcccaggccagagtgcagtggtatgatctcggctcactgtaacctccgcctcccaggttcaggtgattctcctgcctcagcctcctgagtagctgggattacaagcacgtgtcaccacgcctggctaatttttgtatttttagtatagacagggttttaccacgttggtcaggctggtctcgaactcctgacctcgtgatccgcctgcctcagcctcccaaagtgctgggattacaggcatgagccaccatgcctggctgttgaattgttcttaaggcatcatatctagaagcaaagaaaaaagaaaaataacaatttaagttgtgtaaattgtttgcctttatatattacatttggtaaaatcagtgcttaaatacgcaatgatttaaactggaacctgaggtatttttcatgctatctaatcatatacctaagataaaccaacccagttacttatattaataatattcagaaagagaagtggcttttttttttttttgagacggagtcttgctctgtcaccaggctggagtgcagtggcgggatctcggctcactgcaacctctgcctcccaggttcaaatgattctcctgccacagcctcccgagtagctgggactataggcacgtgccactgcgcctagctaatttttgtatttttagtagagatggggtttcattatgttggccaggatggtctcgatctactgacctcgtgatccacctgcctccacctccgaaagtgttgggatcacaggcatgagccaccgcgcttggccagaagtggcattcttaaattcaagaaattgggatggggagtattcacacattttataacccagaaattcaagcaattctggtgactacaaatgcattgttttggagaatagttgtaaggtggaaaaagaattaggaactcgacagatagtgagttttaactttaaataacaattcttcttttgttttgttttgtttgagacggggtctcgctctgctgcccaggctggagtgcagtggcaggatcacggtttattgcagccttaacctcctgggctcaagcagttctccctcctcagcctccagagtagctgggactataggcaagtgccaccacgcctgactaatttttaaattttttgtagagatggggtctcccatcttgcccaggctggccttgaactcttgggctcaagcaagcctcccacctctgcctcccaaagtccaaggattacaggtgtgagccattgcccccagccagtataacagtttktgtgtgtgtgtgtgtgtgtgtgtgtgtgtgtgtttgacacggggtctcattctgttgcccaggcagtagtgtagtggtgcgaccatggctcactgtagtcttgacttctcaggctcaagtgatcctctcacctcagcctcctgagtagcagcggttacaggcatgcatcaccacacctggcttatttttaaaacttttttgtggagacagggtcttactatgttgccatggctggtctagaacttctgggctcgagtaatcctcctgccttggcctctcaaaatgttgggattacaggtgtgagccactgtgtcataacaattattttaaaatttttatttatttatttttaataattatacaagatggagtctcactatgttgcccaggctggtcttgaatgcctgggctcaaatgatcttcctgccttgaccccccaaagtgctgggattacaggcgtgagccactgcgcctggcctataacaattcttatgaagctaaagttgatttggattttagctgccgttactacttatataattaattagattaaacaagtcacaaaaattggatgagctatcttggtgtgttttctttacttttctctttcaacagagagttgaaggagaggacaagtgtcttgtctgtggcttccaggaatgtgtggcaatataagatttactgttacagcagccaactcaccaagtcattatttgacttactgagttaaggaggaactaagggtcattttccccccatcatttgcatgttttgactcctgaactgagggtctacggccactgaagctagmagctagaagggtgttaatcagtagtgagctctacttactccatgtgtcactgacagatgtaaaaaggaatatcaagtaatctattatttaaaaattgtaataagagtgttttttgaaggaattcaggaatgtactactaacgagattatgatgcaggtatatccatccatgaagcatttgttagtcccttgaagcatcatggtagtggaatttaacatggatcatctttgtaaacccacctctctttaggggccagagaaatcactgtttgttacaacaagcaaacctttccctctccatgtcacccttgccccaaacctgagaaacatatgggaacatggcacagaggctgagctctctgaagccagttcctggctggttttgctggccagggagaggcaggtgtggtcagttgccctgtggacatgtggtgtgcagggagagaagagggaaaagagccactcaggctctctggctgccaggggatccagactcttagcactagaacttctgtttcttagaattcttcccaaggaaaagacaaaactgtgtttttataagctggtttcctatagtgtagatttgggacttttatacattttattaccaaatatttttagttaagtgcttcaattttcaacattaattctttaaaattttcttttgagaatcatcacctggatttacatgaattttttaagcatgaaaaaatttaaacatattcaaaagtacatgaatagtacattgaagccttatatacatatcacccagatataaaaattaccaagattttgtcccagttgcttcattttccctgtttccttctttgctaaagtatttaaaagcaaatcccagatagcttatcatttcacccctatatccttcagtaagtttctatggaaaatatggccattttcttgtataaaccacagtacctctgttttttttttttgagatagagtctcacactgtcgcccaggctggagtgcaatggcgtgatcttggctcactgcaacctctgcctcccaggttcaggcgattctcctgcctcagccccccgggtagctgggattacaggtgtgcgccaccatgcccagctaatttttttttgtatcttcagtagagatggggtttcaccatgttggccaggctggtctcgagctcctgacctcgtgatcgcccgcttaggcctcccaaagtgctgggattataggcataagccacagcgcccggcccacagtaccatttttatacctaacaaagtgattccttggtacacttaatacctaggcaaaatcaaattgtcctgaaggtcatgaatgtccttggacagtaatctggttctaatcgaggatctatatgaagcccaccaatcgcatctggttgttgtgtctctttagtctgtcagtctggagcaagctcccctcccttcctcagttccccatgttatttatttattgtaaaaactgggtcagttgtgctgtagaatattctgctttctggatttgtttgtttcttcctgtggtgtcatttaacttgttttactataccctaaacggaacccttttcctctgttttcagcagaagtctgagaggctaaacttgatggctgtgttaacatatgtcacgtgtagcacagtggagaaagcaggatatggctcataatgacagtggtgaagacctgcgaatgaagttgctagttatcacctacattagggtttgacataggtctatgttatgggtcgctgcatctgctggaactcacagactttactatagagaatcaaagatcccgtatccgaagtctatggaaatgctcatggtggtaaattccaacagaatgaaacaccaaacttgcttaaagtaactcacgtttcaatttgaaagagatattgtcaaaattggaggcccccaggttcctgtctgttccaaatctttgcatgatgacagtggtttctctgatgtggtaagctttggctttcttctgttttctttctaaaagatcactggagtagagaggagttaaacagacatgacctttgacctcttgcatgacctccacagatagcaaaccgggccgacacatggttgacgatgtccttttctacaatgaagttaatgaaagttctgaaaatartgattactttctgacattgataggatttaggaaacctctggataaatagcttaagcatggctgtttatgtttttgctatagacaaaaagcagcagcatgtacattgtatttggacacaagcctgcctcggttaatatattgaactattggaccactagggttagtagggagcggtctgtacactttctgattcagcattcagaaacattctaggtggactctgtagctttcagttttgtaaagttatcagaaaaacatcgggagggtttggccatcatatgtgagctttgtgtttcaatgccagttactcaggattagtaaattaatgactgtccagaggacttcagggtcaccaagctgctgcacctgccattggctgactctccccggctatctgtggctgagatggtgctgcttaggtcacgcagagcatgagctgctgctgaaagggcacaggagatggcccttgggcttctcatcccaggatgcctgccctgcccaccaatccatgagaagatatgtatgatttcagtaggccctggatcagcttgtcacctctggtttcctgtttgctttccactcactcagctggagtttcatttccagactaaagtcttcatcattggcttcagaaacagcattcatctgtggctgtgctgatgtagtacaccaagaacaactgggctcttctctgtcactttcagtgggctaccttccctcacctctccaagcagcatgaaagaattctttacatttttaatctcttttttgtttttccctgaaagtatgctttggtgcttaaagagagaagtcacaaaagtatactactgagtttcctggagatgaaatcctgttgtccctagctatgtgaatgagcacagggatccctgatgccattattttgtatattcatacggcacacacttactgagggccttctgtgtgccctaggggattgagcacagtgacatatcagggcaggtagaaacagatggagagctgatgcgggctgtcttagagcagctgccccaggaggcccctgtggatggatgttgggcaggagccctgagacgttaggggcatataactaaaggacatagcaggagttataggaggagctgatccctgagggaaacaatgaagacggagaagatggggctaaagtttgaattgtggggacattaatcacagtgattcttaaaactttgctgttgatgattttaaatggagaaaatgagtacgtaagatgttatttcccagttcagtatattggttgcccacaaagtattttcctaccatgaatggtcatatatacttgttgtagaataccagggacagcagagatggtggggtagttacttccttttcttacagcccaagaactttggtgtccaggagattgaccaatttagccactgagcatttaatacaacacagggctacccagatcccactgtcctgatttgccctgaaagccaaaggagttaggagaaggtgagtggggagaatatattaatcctgagagttgaacagagcaaaaatccctattacttttgtacttaaaacatctctgccacatgtgctcactctttatattctgtttaggtggtttatatgtgcacatcccatcctatgcctgcagttagccaactcagggtttatattgcctcctttctttttttctttttttttttttttttaagagatggggtctcattctatcatgcagactggagtgcagtggtgtgatcacagctcattgtaacctccaacgcctggactaaagtgatcctcctaccttggcctctctggtagctgggactacaggtgcatgccaccacacccacctaattttttttatttttattttttgtagagacagtctcactatcttgctcaggctagtcctgaactcctgggctcaagttatcttgctgcctcagcctcccatgggtaatttttatttcctttttttttttttttggagatggagtttcgctcttgtcgcccaggctggagtgcaatggcacgatcttggctcactgcagtctccacctcctgggttcaagtgattctccatcctcagcctcctgagtagctgagattacaggcaactgccaccatgcgcggctaatttatgtatttttttttagtaagagatggggtttcaccatgttggccagactagtcttaaactcctgacctcaagcgacctgcctgccttggcctcccaaagtgctgggattacaggcatgagccgctatgcctcgtcgctgatttttatttcttattttttttttagagatgggggtctcactatgttgctcaggctgatctcaaactcctggcctcaagtgatcctcccaccttagcctcccaagttgctgggattataagtgtgagccactatccctacctcactattaccttctttgcttctcttgttttcttttgttctaagtcaaacccatcacaatcttttcttgtccttccaggtgttttccagtgctgtgccctggatgtgctctctttctcttagagcccagagaacttgcttttcccccttatatatgacccttaactttttctaacacattattaagggcctgtgtctatcagctgggggcacttcttgaagggagggcctttgtgtggtctgtttctagtgacttccagctttaacccagagcctcatgattgctgggtgcccatagcctttttgctgaatggaggcactcagtctccttgggaagagagaatccatgatagacccacttgggagctccccacttcaggggcctacacactggtaatgcaacagaatgcccaagagtgacctcataaagcaaggattcccttcgtggccccttctctgctgcctctcagaatccagacgctaaggaaaatccstaagcagagattttctgttggatgctaaaagcaaggaataaragttgaaaatttggaaaatgtctcaacaccgtcaccagcgccactcgagagtcatttctagttcaccagttgacactacatcggtgggattttgcccaacattcaagaaatttaagtaaatattatctatctccattgcctgttaagaaatgtgctagtagaagtgtgagggcagggtgtcagtgttctctcagcctcttccctcagatactcgtctgcttaccaaaataagttgcatgtccttgacaatctggtttctatgattggtgaggctggcatgctattacctttatgtgccctgtagacttgaatgaccagtttgaccagtttgactgttagataatctgaaggcttttctctttttttataatagaccccatctcaaatcagataatgaaaattacatatcttgatatattagaaaagtatatacattctggctgggcacggtggctcacacctgtaatccctgcactttgagaggctggggcggatcacttgaggtcaggagtttgagaccagcctggccaacgtggcgaaaccccatctctactaaaaatacacagattagcccggagtgatggtgtgcacctgttgtcccagctactcaggatgctgaggcaggagaatccctttaacctggggggcgaaggttgcagtgagccaagattgcaccactgcactccagcctgggtgacagaacgagactctgtctcagaaaaaaaaaaaaagaaaaggaaaaagaaaaatatatattctatatttttttaacttatgagaatgtgttcatttcatttgtaacatataatgggaaacagtaatacgtactctgagaaaaattgcaaagcacagataaatggaaataaacaggaaaaagaatcacctataacctcaccatccatagacagacactgttaaaattttggcatatttcctgctgattttttctactgctgatttttgcacaggtgagataattttgaacagagaattttgtatctttggtttttgtgttttgctgcacacaaaaacaaaagatataaaaatggatcataaacatttttctaaatcctgaaaaatgcatagacatattttagtgcctgtatttcacaagatggacataccataatttacttacacagtcctttttgttagatgtttaagttgttttcaagcttctcagtgctggaaaaaatactgagatagacatgtttagttgaagttatttcatttcaggttatattatcttgggtcagagaatgaatggttctcaggcttttcaaaagagctggtcagtttttatgcctctggcagtttttgagagtgctcaatcatactacactgttgccagcattagatcttatcacatttaagtcattgctaattttataaacaaaaacaatggttttactttgcatctccctgattggtattgctgtagaacatatttggagaagtttgtttgtctttggtgtttatttcatgaatagattgtgtgcccattttctcttggggtattcagttttttattaytgatgtgagcatgtgtatgggtgattatttgatgattatcagttttgcttagtagactggcaatatttagtcttgctgtcactgtgttcccagtgcctactagattgcttgatatgtagttgccactcaataaagatttgttgagtcaatgaagatgacactttgttttgctggagaaggagtggtgaccattctttttcagaggtccagggagagggagctaagtaactgagtgaggacagagtatccatgatcatcatatatatgtcagtggtcatttattcaacatctcattgctatttaaaagtatatgtaaatttatattcacacaagggagaaagcagagccttgtccctacaaaaaggtatgcattttatggggatctagctctattgtgctgtaaccatacttcacattcaactttttgacaggaggaacgatgatgaatgtcgggcatttgtgaagagagtcataatgagccgtttctttaagataattatgattagcactgtcacatygaatgcgttttttatggccttgtggaccagttatgacataaggtaccgcttgttcagacttcttgaggtaagcagacaaaatgggtccattttcttctttttttaaaacatgctttatttctggaaacattataagatttttttttttttccgagacagaatctcactctgtcaggctggagtgcagtggcgtgatctcagctcactgcaacctccatctccacctcccaggttcaagcgattcctctgccttagcctcctgaatagctgggattataggcacccgccaccacgcccagctaattttgtatttttagtagagacggggtttcaccttcttggccaggatggtcttgatctcttgacctcgtgatccacccgcctcagcctcccaaaatgctgggattacaggygttagccaccatgcccagcccattataagattttaagggtattttgcttcaagaaattttctgtagaattctaaaaatactctaaaatctgggaagagggtggcaagagcagcagtggtgacatggtggatttttttttttttttttttttgagacagagtctcgccctgttgcccaacctgcagtgcaatggtgctatcttggctcactgcaacctctgcctcccaggtacaagtgattctcctgcctcagccgactgagtagctgggatcacaggcacacaccatcatgcttgggtaatttttgtgtttttagtagagatagggtcttgccatgttggccaggatggtcttgaactcctgacctcaagtgagctgcctgcgtcgggctcccaaagtgctggcattacgggcatgagccatcgcgcctggccagtgacatggtttttaagtctccttgaatctcctctcaaaaactgagcaagcctgggcaacaaagtgggactcctatctctctttttttttgttttgagacgaagtctcgctctgtcacccaggctggagtgcagtggcgcaatctcggctcactgcaagctccacctcctgggttcacgccattctcctgcctcagcctcccgagtagctgggattacaggcgcccgccacaacgcccggctaattttttgtatgtttagtagagatggggtttcaccgtgttagccaggatggtctcaatctcctgacctcgtgatccgccctcctcggcctcccagagtgcaggtattacagacgttagccactgtgcccggcccctcccatctctattaaaaaaaaaaagttgggcatggtggtgcataccttgagtcccagctactctagaggtttaggtgggagaattgcttgagcctgggagttcgaggctgcagtgagctgtgattgcaccactgcactctggcctgggcaacagagtgagaccttgtcctaaacaaccaaccaaaaaaaccagagcaactaggtagcaaagccaagaacccacaggcagcatttacaacaaaactggttagtttccttactacaagccgtaagaactgaatagtatgtctctgtggggaaagaaacagagggaagccattatttatttattagaaagtgtgatgggctgatgtgagaacagcatttgatatcagtaacagtattgtctaatccaatactgggctagatcaagaggttcctggtaatttttgaaggggctagaggagcagatggtgtgaactttcaaagctgaccagctagaggtctttttaaagacaggatcccacagttgggataaatactggaaatggaataaaaattgagcaggttagagacatagagatgaaggaagagaaggttcagataaaattggaggaggaaccaggatacctcaaaaatcaagctactgcgtttttaaacacaacacaaaagcagaagaatgagctcagtgasgttagaaccacaccatcttctaaaagctcaagaaaacaaattttatgtaaaacagcacaatagaaaaagattgatgctgctatagttgtgtttttagaaaaaaaagggttgagataaagtctcatacacaattactgtaagaaaaaagagaatgaggtagagaataatccccttatacaggctgagcatcccgaatttgaaaatctggaacctggaatgctccaaaatacaaaatattctgagcactgacgtgacactcaaaggaaatgcttactggagcattttggattttggattttcagatgtgggttgctcaactggtaaagaaaatgcaaatattccgaaatccaaaaactttgaaatccaaaacacttctgttcccaagcatttcagataagagatacttaacccgtagataatgaaagcccaccacaaagacatgcccacaaaacagggagagactgtagcatatgactttaaaacaagccagatgtttaagaaagtgatacaagataggaaagaacagaagtgaaaagacaaaactcaggaaagaactagaaataaaaatttcaaaaataaagactaaaatagactaagcaattaattgcaacagataatagcttaagagaagtataggattaaatgtaggaaattttttaaatcaataagaaatgaagacatgaaaaggtttcaagagaaaatgatgaacatcgaagatggggaaaaaaaaatccagtgtaatgacaataggagcccctgaatttgaaataaaacagacacaaagcaaaggaacagaacaaatgctaaagtgtataatccaagaaaagttacctgaaacaaaagatttggaactatacgttgaaagagcacacattgcatacctgagaatatggagtttgaacaataaacaccaaaacatattctagtaaaattattggattttaaaggaaagagggggtgaaggaaactaagtatcaatgcaatgtggcttataagaagataatcacttatcatcaaactttgctatggtaatatgttatgccaaaagaaaatagagttacatatttaagatacttcagcaaagaaaatgtaaaccaagaattttagatcagaaaaattgactttcaagtataaaggacatagacaaattcatcaatattcaaaaacttggggaatattgtttccaagagcccttccttagtaatttactaaagaataggtttcagccaaccaaaatgattagagaagcatcaacattaggactgaagatgagcattaaatatgtagttatttgtagaactaatattaattgtggtttagcagagagaatatagtatataatgaatgcatcatctgacagtgaagatagagtatgactaaaaaatgggagacaatggggaaagccaagataaaaagtttcaaaatcattttcagtaatcaacttagtggcaacagtattagtagtgttattctgagacttgtatgtctgtaatacaggataagrcaattgagtaattatgggacagtttatttctgtcatctcctgtgttcttaagaaccaggatactcatggaggagagaacccaggacttctttgagaaataaccaattccaggtctagggcaggaggtacacaagatgaaccatgattatcttgtcatagacattagcaaggaagctatcaaagactactggggtcatgtcaaaagtctcaggagactatgtgaagagtcctactggccaaagatgggacagtttgagctccaataagaagaataattgccatgtattgaaactcattaaataatctgtgaggttttactactggccaaagatgggacagtttgggctccagtaagaataataattgcaatgtattgaaattcaccaaataatctatgaggttttaatgataccccaaaacaaactgtccacttttggaggatgataaggagctaatcctttatcttgataattagtaaattaagggaaagagtcaagcattactgaccttatgtgaactgcaatactgagtaagcatatagtaggtgaggggaaacatctttttatagatgtgtcccccttaataaatgaaaaagaaatgatagaatatcacagtttttcaatgcccaaagaagttattgatctaggcactgagcatcaatgaaaagagagacaaccagaaattatgtgccgtctataaaagaacagcacctctaatcttgccaaagagatcaggaaatatggaggccagagggatatgctgaactgtaccatgagcgtgcactcagcaaaatccagactgggagattttacaagtcaaactccccaggttctttaacagataaattgtaaggaaagaaaaaggaatgggagacttaaaagatacaccaaaagtttaaaaatttataaaatggcaagacgacttattagttctagggatggatgcatgaatttttatctataaagaaatgcaaggtattaattactataaaaatttggatagtggttaattttgggtggagggagggagttgtaattgggatgtgggacatgtgaggggcttctgggatggcagagttctatttcttgacctaggtggtagttacagggatattggccttgaaataatttattacactatatatttgttcatgtggttctatatgtgtgtttattttgcaataaaaaggttaaaaatatactcttcttatctttaggataaataacacatttccttcttgggggtgaaaaggttagcataaacataatgtggtatcagaggcagtcgaggtggtgggataccacaattaatgcttaaaatgtgtcagatccacttggcaccacttctgtgaacatgttggtatggcagtgaattccacaccacaaatccagagattggttatggactgtggaacatcatgttaggtataggacttggcaggggtcagggaaagagacaaattgaggagcctaaaccctctgtttgcctccctgatgccataagggtcactaagcatgtatcctggtttagggacctggtttgcaagcctaggggatgttctgtgatgggcagactttggagttatacagatttgggttcaagccccagcttcctaccttattactaactgagaatttggacaaattacttaagctctctgtggtttgtctgcaacatttgtaaaatgatataattaatatacaacttacagggtggtggtacagccattgaaaataacatgtatgaaagcccctggttaactgtgaaactgagaaattattaacacttctgggaactccactgaaggtgccgggaaagatgtgagagagccctgatctctcacctctggctaaccttgaggctctgtgcaagcaggaaatgaaggctgaggcagagtggtaagttgctagagcattgaacatgtggaaatgctgtaggaaagcttataaaaaaagacaaacaaacaaacaaacaaaaaaaacccaggcaacatagtgagaccctgtctctgtggggaaaaacaaacaaacaaacaaacaaaaaaaacaggcatggtgccatgtgtctatagtcccagctgctcagaagtctgaggtaagaggattgcttgagctcaggaggtcaaggctgtagtgagccatgattgcaccactgcactcccagctggatgacagagtgagacgttgtctcttattaaaagacaacaaataaatgctggtgaggatgtggagaaaggggaactcatacattgttggcaggaatgtaaattagtacagctgttatggacaacattatggaggttcctcagaaaattagaactaccatatgattcaacaatcccactactaagtatatagccaaagaaaatgaaatctgtatattgaagagatatctgcaatcccatgtttattgtaacactgttctgaatagccaagatatggaatcaacctaagtgttcatcaatggatgaatggattttaaaatgtgctatatatacacaatagaatactattcatatgtaacaaaggacaaaatcctgtcatttgcagcaatgtggatgaacttagaagacattatgttaagtgaaataagccaagcacagaagaacaaatactacatgatctcactcatgtggaatctaaaaaagttgactcatagaggtagtatattagttagtttttgcattgctataaagaaatacctgaggctgggtaatttataaataaaagaggttttattttggctcatggttctgcaggctgtacaggaagcatagtaccagcatctgcttctggtgatgctggcaccagatgcttgggaggattgcttgagcctgagtgatgatctgtgatcacacctctgcactccagcctgggtgacagagcaagaccccataccaaaacaacaaaaacaaaaccccaccccaccccacccccaaaaaaacccaaggtctgttctattgcctctgcaaccaaggagcagggtttcacattgggaatgtaagctggtgcaaggggtgggctcccggggccttgggaagctccaccccagtggctttgcacagtgcactccctgtgtctgctctcatgggttggagttgagtacttgcagcttttctaggcttaggatgtaagctgctcatggctctatcattcttgggtctggagagcagtgggtcccttcccagagctccactaggcagtgccctagtggagactgtgtgggggctctagccccaaatttcctctttgcactgctttagtaaaggttctctgtgaggactctggccctatagcaggcttctgcctggacacctgggctttcttgtacatcttctgaaatctaggggaaagctgctaaacctccatcactcttgcattccctaagcccacagacttaacaccatgtggaagccaccaaggcttgcagcagcttgtgctctccaaagtcatggccccagcaatatgggttccagagcagaccttatttgagctaagactggagctggagaagccaggatgtggggagcagtgtcccaaggctgctcagggcagcagggccctgggcctggccccagaaatcattcagtcctcttaggcccctgggcctgttatgagaggggctgccttgatctctgaaatgccttcagggccttttccccattgtcttggttattagcacttagctccctttcagtcatgctaatctctctagcaagtcattgcttcatagcctgcttgaatttctctcctgatagggctttctctgtctctggcaaatggcgagtctgcaaattgtccagacttttatactgtgcttcccttttaaatataagttccaactttaacctctcctttcctcccatatctgatcataggctgttagaagcagccaggacacatcttgaacattttgctgcttagaaatttcttccgctagattccctaagtcatcactcttatgttcagctttccacaaagccctaggatatggaaacaatgcaaccaagttctttgctaagggataacaagggtgacctttattgtagttctcaatagactccacatttccatctgagacctcatcagcctgggcttcactgtccatgtctttatcagcattttggtcacaaccatttaaccagtctctaagaggttccaaacttttcctcgtcttcctgacttctgagacttccaagctcttccattctccctgttacttagttccaaagctgcttccacattttcaggtacctttatatcggtaccacacttctggtaccattttcccatattagtttttgtgttgctgtaaagaaatacctgaggctgagtaatttataaagaaaagaggttatattttggctcatggttctgcagaccataaaagaagtatggtgccagcatctgcttttggtgagggtcccaggaagcttacatggtagagggcaaaggggagccagcatgtcacatggtgagagagagagcaagagagagaggggggaactgccacacactattaaacaaccagatctcatgtaaactcagagtgagaactcacttatcaccaatggaatggtgctaaaccattcataagggatctgctcccacgatccagtcaactcctgctgggccccatctccaacactgggaaccacatttcaacatgagattgggaggagacgaacatccaaaccgtattatgtcaatagtggttgctaaaggctgggaagagcaggggggaaggagaggagcagaggttggttaatgaggtacaaagttacagttagataggaggaattaattttggtgttctgtgcaatagggtgatgatatttagcaatatgcrttgtatacttcaaaatagctagaagagaggactttgaatgttcttatcacaaagaaatggcgtgtttgaggtgatgaatatgctgattaccctgatttgacattacacattgtatatatgtcttgaaatatcatactgtaccccataaatacatacaattattatatgtcaattaaaaacaaaataaacgttaaaaaacaaaacacaatctataaaaaaactgattgcaaacattatacttaatgatgagaaacttgatgccttcctacgaagatcaggaacaagaaaaggatgcttactttcaccactcctatttaacatcatactggaagtcatggctaatgcaataaaacaagaaaaagaaataaacatgtaaagactggaaaggaagaaataaaactgtctttgttcacatatatattttaaaagttaggaaagttttgttatattttcttttttttttttttgagacagagtcttgctctgttgcccaggttggagtgcagtggggccatcttggctcactgcaagctccgcctaccaggttcacgccatcctcctgcctcagcctcctgagtagctgggactacaggtgcacggtgccatgcccggctaatttatttttgtatttttagtagagacggggtttcaccatgttagccaggatggtctcgatctcctgaccttgtgatctgcccgcctcggcctcccaaagtgctgggattacaggcatgagccaccgtgcccagccagttttgttatattttcactgccttgtccactcccctccccagcatggtgatgatcctgaagacagcagctcacattcctaatgtagaaccctggtccttggttccagagcagactttatttgtttgtttgttgagatggggtcttgctctgttacccaggctggagtgcagaggcgtgatcacagatcgttgcagcctcagctgcttgggctcaagcaatcctcccacctcagcctcctgagtagctgggaccataggcatgcaccatcatgcccagctaatttttgtatgttttgtagagatggggtctcgctatgctgcccaggctggtctcagactcctgggctcaagtgatccactcaccttggatctcccaacagtcatgagccaccatgcactaacccagaccttgttcttaaagaattgtattggtccattttgacctgagagccaggtgaaggactgatggaagttgactgcttttgtttcacctagcttggaattttctcaaagcagaaaggtggctatagagagggaatttcttacaaacattaaaaggcatgtgaacagtctattgctgcctggggcaaaaaaagttaaagcaaacaacggacatactgaagtgtaggaagaaaggcctagaagggagattctttggataagtaggacattgagaagctccggtgtatatggagaaatttagaaagcattcatgcccaaggcaggacgaatgtttcaaaaagacctaaggtctcaagatttcacctttagctgatctttaggctcagtaaaaactggaagttaggggtaatgtagagttgtaaatggctttgctaagccctgaaagagtaccccaacacagagccaatctaaaaaatctaggagaacttttcttcctccctccctccctcccaccctcatttcccacccttccctccctcctttcctacccttccctccttttcttctttctttttgagacaaagtcttactctgttgtctgggctagagtgaagtgacatgatcatagctcactgcagccttaaactcctggactcaagggatcctcctgtctcagcctgctgagtagctaggactacagacatatatcaccatgcccagctaattttttaattttttgtagagatggggtctcactatgttgcctaggctggccttgaactcctggcctcaagagatcctcctgcctgggcctccygaagcactggggttacaggcatgagccaccatgcctagcctatcttcttcctttcctttttctctcctctcctttattctcctttctctttttttctttccctcctccctccctccctcctctcttccttccttccctccctccttccctccttccctccttcctttcctcctttctttttttctttctttcttttttttttttttttgagatggagtcttgctctgtcaccaggctggagtgctgtggtgtgatcttggctcactgcaacctccagctccctggttcaagtgattctcctgcctcagcctcccgagtagctgggattacaggcatgcaccaccacacccagctaatttttgtatttttagtagacatggggtttcaccatgttggccaggatggtctcaatctcctgacctcatgatcctccctcctcagcctcccaaagtgctgagattacaggtgtgagccaccacgcctggcccctttcctcctttctttatcagacagtctcactctgttgcctgggcttgggtgcagtgacatgattatagctcaatcagccttaaacccttggactcaaaagatccccacatatcagcctcctgagtagctaggactacatgcatacaccaccatgtccaggtaatgaaaaaatgttttttgtagatacagtatctcactatgttgctctcaaactcctggcctcaagagattctcctgccttggcctcccaaagcactgggattcaggcatgagttacaatgcctggcctttctctctctctcttgctctctttttcttatttctttttatttttcctttttctttcttcctctttcctcccttccttcttttgtttcttctttccctcttcttcccttcattttttccccaaaccctctctctctctcccttttttccttctttctttttgcttgagacatttaagaaaatctctgttggccgggcacagtggctcatgtctgtagtcacagcactttgggaggcccaggcaggcagatcacttgaggtcatgagttcgagaccagcctggccaacatggtgaaaccctgtctctaataaaaatacaaaaaaattagccaggcatggtgcctgtaatcccagctacttgggaggctgaggtaggagaattgcttgaagctgggaggcagaggttgcagggagttgagattgtgccactgcactctagcctgggtgacagagtgagactctgtctcaaaaaataaatagaaagaaaatccctgtcaaaacactagttgaccagaaagtgaagaaatagagacttcagagatcacacacaacaaagaatatagttctttgcaaaaatagtttagaaaagtcactaaacaagtaaatacaactcacataaagcaacaaaaacaaaccatgaggagggggaagaatttgatttccaaacttaccacgttgcaatatttaaaacatttggttttcaacaaaatattataaagcaatcaaagaaacaaaaatgtctgacttatacaatgaacagaaactcttcctgaggaaacccagtcattggaattactagacaaaggctttaaaaataaatgctcaaagaggccaggtgcggtggcttctgcctgtaatcccggcaatttgggaggctgaggtgggtggatcacttgaggtcaggagttgaagaccagcctggccaatgtggtgaaacattgcctctactgaaaatacaaaaattagccaggcttgatggcagggcctgtaatcccagctatttgggagactgaggcaggagaattgcctgaacccaggagacggaggttatctagggggattcagtaacagatttgagtaaatagaataaagaattggtgaacttgaagacaggtcagttgaacttgttcactttgagaagcagaaagaaaaaatgatgataaatgaacagagcctatgagaactgtgggacaccataaaacatactaatatacacataataggggttccagaaggagaggagaaaataaggcagaaataatatttaaagaaataatggccccaaattcccaaatttgatgagagacatgaatatatacatccaaaaattccaatgaattccaagaaggagaaacataaaaagagccacactaagacatgtaatcaaactgtcaaaagccagaaataaagtgagaatcttgaaaacagcaagggataagcaagttgtcacatacaagaaacctcaataagattaacagccgatttatcctcagaaactatggaggccaaaacacagtgaaaagccatgtttaaaatataaaagaaaaaatactgtcaatgagaaatactgtattcagcaaaattatccttcaaaaatgaaggggaaataaagacttccagataaacaaaaatgagagggtttgttgctagtaaacctgccctcaaaaaaatgataaaagttgttttgtaggtggaaatgaacaagacagtaacttgaactcatacaaagaaataaagaacttgggtaaggcaactgcatcagtaaatacaaaagctagtgttattgtgtattttgatttgtaactctttttaaaaatatatggtttaaaataccaatgttatagttaatgggcacacatgtttgaaggagtagtttataatcacaaaaacatgaagggagagagatgaagctgtatagagcagaattgttatatactattgaagctaaggttgtgttaattaaaaatagattgttataaatttaagaggttaattataatccaaagggtaagcactaagggaacaaccaaaaaaactgtacagaaaaggaaatgagaaaggaatcaaaatggcacagtacaaaaaaatcaggtatatatgcaaaaaggcagtaatggaggaattgaggaacaaaaatatatgacatatagaaaacaaatagcaaaacagcagaagtgtgtcctttatctgtaattactttaaatataaatggattaaactctccaattaaaaggcagagatgaacagatttttaaaatcccattcatatgttgtctacaggagactcactttagattcaaaggtacaaatagtcatgaccagcctggccaacatggtgaaaccccatctctactaaaaatacaaaaattagccaggtgtggtggtgcacgcctgtagtcccagctacccaggaggctaaggcatgagaattgctagaactcggtggcggaggttgcagtgagctgaaattgcaccactacactgcaatctgggtgacagagtgagactctgtctcaaacaaatgaagaaacaaaccaaagatacaaataggttgaaagtgaaaggatggaaaaagatattccaaacaaatagaaaccaaaagatagctggggtggctatactaatatcagacaaaatagatagtaaggcagaaactgctctaagagaaaaggaaggacattatattgacaaagggatcaattcatcaggaagataaaacaatttttctctagtacacaaggatcactctccaggatagattatatattagaccatacaacaaatctcaataaattaaaatattgaaatcaaagcaatcctaagcaaaaagaaaaagtctggaagcatcacattatccaactccaaattataccacaaggttatagtaaccgtaacagcatggtactggtataaaagtagatgcatagatgcagtggaaaagaatagagaacccagaaataaggccaaatacttagcaaccaacccatattcaaagcatacaaaaacataaattggggaaaggacaccctattcaataaatggtgtggggagaactggttagccacatgtagaagaatgaaactggatccctgtctctcaccatatacaaaaattaactcaatggaataaagacttacatctaacacctgaaaccacaaaaattctagaaggcaacctgggaaaaactcttctggacattggcctaggcaaacagtttatgattgagaccccaaaagcaaatgcaacaaaattgtataaatgggacccgattcaactaaaaagcttttgcaaaggaaataatcagagtaagtagacaacatacacaatgggagaaaatatttgcaaattatgcatctgacaaaggaataatatccaaaatctacaaggaactcaaagaaattagaaagaaaaacaaatcccattaaaaaatgggcaaaggctataaatagacttttatcaaaagaagatacacaaatggccaacaaacatttgaaaaaatgctccatatgacactaatcagcatggaaatgtaaattaaaaccacaatgacataccaccttaccccagccagaatagccattattaagaagtcaaaaagcaacatagatgttggtgtggttgtggtgaaaaggaaatgcttatacattgctggtaggaagctaaattaggacaacctctatggaaaacagtatggagatttctccaagaactaaaggtgtatctaccattcaatccagcaatcccactactgactatctccccaaaggaaaaaaaaatcactatatcagacacctgcatgcattttttttttttttgagatggaatctggctctgttgcccagactggagtgcagtgagaggcacgatctcagctccctgaaacctctgctctcaggttcaagtgattctcccgcctcagcttcccgagtagctgtgattacaggcatacgccaccacgcctggctaatttttgtatttttagtggagacggggttttgccatgttggccaggctggtcttgaactcctggccttgagtgatctgcccacctcagcctcccaaagtgctgggattacagtcatgagtcactgtgccaggtctgcatgcatatgtttattgcagtgcaattcacagttgtaaagaattggtatcaacctaagtgcccatcaaccaatgagtggataaagaaaatgtgatatatatacacgatgaaatactactcagccattaaaaaagaacaaaagaatgtcttttgcagcaacttggatggaattggagggtattattctaagtgcagtaactcaggattcaaaaaccaaatactgcatattctcacttataagtgggagctaaactrtgggtatgcaaaggcaaacagagtggtataatggacattgtggggagacagtgaactcagaagggggaggttgggaggagggtgagggacaaaaaactacctattgggttcaatgcacacctacatgggtgatgggtgcatccaagtagtgtacattgcacctaataggtagtctaaagtcccagacttccctgctacacaattcacccatgtaaccaaaaaccatgtgtacccctaaaagtattgaaataggccaggggcagtggctcacatctgcaatcccagcactttggaaggccaagatgggaggatcacttaagtccaggaatttgagattagcctggacaacataatgggacccccatctattaaaaaaaaaaaagagtggtgatgtatgcctgtagtcctagctgcttgggaggctgatgtgggaggatcacttgagcccaggaagtcaagggtgcagtgagccatgactgtrtcactgcactccagactacgtgatagagcaagatcttgtctcaaacaaacaaactgacaaaatccccccaaacaaaaaacaattgaaattttaaaaaaatttaaaaagaaacacacacacaagaaacacacacacacagccatatatatatacatatataatgaattctaccagtcacttaaatatatatatacataaaattagacaaagtatcttcactgacagcaatgaaacggaactacagaggaaaactacatttttcaaatatgtgtaaattaaacagcatactctttttttttttttctgagatggagtttggctcttgttgcccaggctggagtgcaatggcacaatctcagctcactgcaacctctgactcctgggttcaagcgatcctcctgcctcagctttctgagtagctgggattataggcatgtgccaccacacccagctaattttgtatttttagtagagacacggtttctccatgttggtcaggctggtctcgaactcctgacctcaggtgatccactcacctcggcctcccaaagtgctggaattacaggcgtgagtcactgtgcctggccttaaacagcataccctttttttttttttttttttttgagatgaagtcttgctctgtctcccaggctggagtgcaatggcacaacctcagctcactgcaacctctgcctcccgggttcaagcaattctcctgccccagcctcctgagtagctaggattacaggtgcatgccaccgcgcccagctaatttttgtattctttagtggagacggggttttgccatgttggccaggctggtctcgaactcctgacctcaggtgatccacctgcctcagcctcccaaagtgctgggattataggcgtgagccaccatgcccagccaacagcatactcttaactaatgggtcagagaagaaatcacaagcgaaattagaaaatataagatgaaaataaaaaacataacaaaactcataggatgcagtgaaagcagtgctcagagggaaatttatacctataaatgcttgacattagaaaagaagaaaggtctcaaatcagtaacctaactttatgccttaaggaacgagaaaaagaagagcagataaagctagcagaaggaaggaaataacaaaatactagaacgagataaacaaaatagagggtagaggaacaatagagaaaatgaacaaaatcaaaagttggttctttaaaaagatcaacaaattgacaagcctttagctagattgactaagaaaataagactcaaattactaatgtcagaaatgaaatttgggacatttctactgatcttatagaagcaaaaagggttataggagaatactataagcaattatatgccaacaagttaaataatctagatgaaatggacagcacacaattgacttaagaagaaatagaaaactgacccatcagaacagataacaaaaggttgaatcagtaatcaaaaacctcccaacaaagaaaatctcaggaccaggtagtttcacatgtgaattctaccagtcatttaaggaaagattaacaccaattcttcccaaactctaccaagaaatagaagagggaagacttctgagctcatccatgagaccagcacaaaacatcattaagtaaagaaaactatagacagatattctttaagaatatagatacaaaaattgtcattgagagagtaacaaactggagccagaagcatacttagcaggattatacaccacgatcaagtgggatttatctcaagaaagcaagggtgattcaaaatacaaaaatcaatcaatgtaatacaccagtagagtgaaggaaaaaaattcaccttagttgatgtagaaaaagcatttgatgaaatccagcattctttcattatacaaaaaaaattaaactacaaatagaaaggaaattccttaacttgataaagggcatttatgaaaaaacccacagttaacttcagacttaattgagaaagacgaaaagccttccccctaaaattaggaacaagactaatatgactgctttcaccacgatttaacattgtactgaaagttctagccagagtcatcaggcgagaaaaagaaataaaaggcatctaaattgaaaagaaagatgtaaagctatggatatgcctcagatattgtggattaagttccagaccaccacaataaagtgagtcacatgaatttttttgtttcctggtacatataaaagttaaggttacattatactgtagtctgttaagtgtgcaatagcattagatcttaaaaaagtatatactttaatttaaaaatactttattgctaaaaaatgccaacaatcatctgagccttcagcaagacataatctttttgctggtggagggtcttgccttgatgttgatggctgctaactgatcaggatgatggttgctgaaggctggagtgtctgtggcaatttcttaaaataagacaacaaggaagtttgccacatcaattgactcttcctttcatgaaagatttttctatagcaagtaatgctgtttgttgaaatattacccacagtagaacttctttcaaagttgaagccaatcctctcaaaccctgccactgcttttatcaacgaagtttacggaatattctaaatcctttcttgtcatttcaacaactttcatagcatcttcgccaggcgtagattccatctcaaggaaccagtttctttgctcacccatgaaaagcaactcctcatctcttcaagttttatcatgagattgcagcagtttagtcacatcttcaagctccatttctaattctagttcacttgctatttccacaacatctgcaattacttcctccagtgaagtcttgaacccctcaaagtcatccacgagggttggaatcaacctcttccaaattcctgttcatgttgatattttgatctcttcctgtgagtcctgaatgttcttaatggcatctaggatggtgaattctttccagaaggttttcaatttactttacccagacccatccgaagaatcactatgtcagctatagccttatgaaatgtatttcttaaataataagagttaaaagttgaaatgactccttgatcagaatggatgttttattagcaggcctgaaaacaacttcttcatctttttatacatctccaccagaactcttaggtgaccaggtgcattgtcaatgggcagtaacattttgaaaggaatctttttttctgagcaataggtctcaacagtgagcttaaaatattccataaaccatgctgtaaaccgatatgctgtcatccgggctttgttattccatttctagagcacaggcagagtagatttagcatcattcttaagggctctaggatttttggaatagtcaatgagcactggcttcaacttaaagtcaccagctgcattaccccctaacaagagagtcagcctgtcctttgaagttttgaagccaggccttacttttcccctgtagctatgaaagtcctagatggcttcttcttcagatataagtcttttttatctactttgcacattgaaaatctgtggttgagtgtagctactttcatcaattctcttagctagatcttcgggataaggcgttgcagcttctctatcagcacttgtacttttatgttgtggagataagttattttctcaaacctcaagaaccaacctctgctagctttcagcttttctccggcagcctccttctctctctcagacttcaaacaattgaagagaattagggccttgctctggattaggccttggttttaaggaatgttgtggctggtttgatctgtacagactgccaaaactttctccatatgagcaatagggctgttttgctttcttatcatgtatgtgtttactggaataacttttaattttcttcaagaacttttcctttctattcccaacttggctaactttttggtgcaagaggtctaggttttcaacatgctttcctcactaagattaattatttctagcttttgatttgaagtgagagacttgcaacccttcatttcacttgaacacttacagatcattgtagggttattaactgacctaacttcaatattgttacatctcaaggaataaggaggccccaggagagggagagagatggaggaatggctggtcagtggagcagtccgaacatgcacattcattgagtttgctgtattatatggatccagtttatgccatcccaagcaattaaaatagcgtgaaccccgaaaatctgagacaggtctcagcaaatttagaaagtttattttgccagggttgaggatgcatgactgtgacacagcctcaggaggtcctgacgacttgtgcccaaggtggtcagaacacagtttggttttatacgtttcaggcagacgtgagacatcattcaacatatgtaagatgaacattggctcagtctggaaaggcgggacagctcaagcagggaggactttcaggtcctaggtagataagagacaaatggttgcattcttttgagtttctaattagcgtctccaaaggtggcaatcagatatgcatttatctcagtgagcagaggggtgactttgaatagaatgagaggtaggtttgccctaagcagttctcagcttgacttctccctttagcttagtaatttcagtgcccaagatattttcctttcacaatagtaacatcaaagatcactgatcacagatcatcataacagatataataataatgaaaaagttggaaatactgtgagaattaccaaaatatgacacagaaacatgaaataagcacacaccgttggaaaaatgacaccaatagacttgcttgatgtagggttgccacgaaagttaaatttgtgaaaaacctgcaggatctgcacagtgcaataaagtgaagtgcaataaaacaagggatgcctgtatctctatttgcagatgacttgatcttatatataggaaatcctaaaagaatccatatactcacatacacacaagaggtattaaacaaattcagcaaagttgcaagatacaagattaacaacaaaatcaattatatttctctttttctctgtactgtattagctgaaaaaaatcaattgtatttctatgcactatcaattaacaatctgaaaaagaaattaagaaaattatctttacaagagcatccaaaaggataaaatacctaggaaaaaatttaaggtgatgagagatgagtactgaaaactataaaacattgctgaaagaaattaaagaagacttgaataaatgaaaagacatcctgtgttcatggaagagatttaatcttgttaaaatggcaatacttttcaaagcaatctacagatacaatgcaatttttgtcaaaattccaatagtgttttttattgctacagaaatggaaaaggagatcttcaaattcatatggatatgtaaaaggccccaaatagctaaaacaatattgaaaacgaggaacaaagttggaggacttgcactttctgacttcaaaacttactacaaagatatagtaatcaaaacagcatggtactagcaataggatagacatatagaccaagggaatagaactgagaatctagaaataaattcaaatatctatggtcaattgattttttgataacggggtcaagaccattcaatggggaaagagtagtagtctcttcaacaaatagtatttggacaacttggtattcacatgcaaaagactgaagtttgacacctacctcacaccgtgcacaaaaacaaactcaaaatgaatcaacaacctaaatataagaactaaaacttttagaagaaaacataggggtaaatcttcatgaccttggatttggtaatggattcttacacatgacattaagagtacagacaacaaaagaaaaaacagacaaattgggcttcattaaattaaaacattcatgcatctaaggacactatcaagaaggtgaaaagaggctgagtatgatggttcatgcttgtagtttcagcactttgagaggccgaggtgggaggattgcttgagcccagtttgagtttggaccaacctgatggaaccttgtytacaaaaaatacaaaaattagccaggtgtggtggcatgtgcctatggtcccagctacttgggaggctgaggtgtgaggatcrcttgagcctgggaggttgaggctgcagtgagccatggtcatgccactacactccagcctggatgacagagcaagaccctgttttgaaaaaaaaaaaaagtgaaaagacaatccatagaatgagagaaaatatttgcaaattatatatctgataaagaattgatatctagaatatataaagaacttctacaattcaacaacagcatcaacaaaacaagcaacccaatctaaaaatgggcaaaagacttacatagacatttctccaaagtagatattacaaatggccaataagcacatgaaaagatgtttgacatcactagtcgttagggaaatgcaaatgaaaaccacaatgagatacaatttcacacctattagaatagttattattaaaaaaaacaaaaaatggggccgggtgcagtagctcacacctgtaatcctagcactttggaaggccgaagcgggtggatcagttgagatcaggagttcgagaccagcttggccaacatggtgaaacctcatttctactgaaaatacaaaaattagccaggtgtgttggtgggcaccagtaatcccagctacctggggggctgaggcaggagaatcacttgaacctgggaggcagaggttgcagtgagactcagatcatgccactgcactccagcctgggcaacagagcaagactccatctcaaaaaacaaacaacaacaacaaatggacactaacaagtgtcggtgaagatgtagagaaattagaactgcattgcttgtgggagtgtaacaatggtacaactactgtggaaaacagtttggcagttcctaagaaagttaaacatagtattccacgatctggcaattccacttctgggtatatacccaaaagattgtaaagtggggactcaaacagatacttgtattgtgcatacatgttcatagccgcattattcacaataggcaaaaggtggaagcagcctaaatgcccatcaacagatgaataaacaaaatatggtagatgcatacaatgctatattattcatctttaaaaaggaatagaattctatttttaaatcagaaaccaacacatgctagaaatagaattctgcattctattccacgtgctacaacatggaatgaaccttggaaacattccatgaagtgaaaaaagccagacacaaagggacaaatattgtatggtttcacccatatgagatacctagaataggcaaattcataccatcagagagtagactagagattacctagggttgcggggagaggggaatgagaacttattgtttattgggtacagagtttccatttgggatgatgaaatccttctggaaatggtagtaatagttgtacaatattgtgaatgtgcttagtgccactgaattgtacaccttaaaatggttaaaaatgatagtatcaacaaaatagttaaaaagaaaatatcaataaagtcaaagttagatcacagaaaataattataaaataaagaactttcttcatgagacgatcaagataaatagaagccctaaattaggaattaaaaagggaagtacagatacggtagatatcagaagtctaacaattttatgccaataaatttgaaaacctagctgaaatagataattttctaaaaaaaattataaaactgattctcaataagcaaaaacttgaaataaacattatatatcctttaatggctataaagcattgtcttagtttaaaatttctactrcccaaaacaaactaacctggactatatggtttacctgcatggaaggtataattataaacatataaaactgtccaggcgcagtggctcacacctgtaatcccagcactttgggaggccaatgcgggcagatcacgtgagatcaggagttcgagatcagcctggccaacatggtgaaactccatctctactaaaaatacaaaaattagccaggcgtggtggcaggtgcctgtaatcccagctacctgggaagctgaggcaggagagttgcttgaacctgggaggcggaggttgcagtgtgctgagattgtgccactgcactccagcctgggtgacagattgagactctgtctcaaaaaaaactataaaaaaggtgaaaagtcaatgtgataagtcggtgtgggagaagatatttgtaacacatataacaggcaaagcattaggattcaaaatgtataaagatgtcttcctgatcaataagaaaaagacaaaacaatccagcagaaaatttggcaaaagattagaaacaggcaattcataatttaaacatataaaaatgcccaactttattaatagagaaatgaaaatttaaaaataggatactatttcatatttgtcacattgatgaagtctgatagtcaaagtgttagcaaagatgtagaacaagaggaacattgctgatattaaagtagattggttcaataacttcagaaaacaatttgccaatatatagtgaagttaagatgttcatatcctacaacgcagtaattccactcctaggtatatatctgagagatactttagacatgtgtacaataaaacatacaagaattgttgtgagatatcttaaaaatgtaaattagttcagatcacttccttcctcaaaatcctctgaggctgagattaaaattcaaagtcctcaccaggcctacaaggcatgacagtttgcttgtctaaccacctctgctgctctgctctctctctctctgttctagccatgctgactttgctgttccttgaacagcctctttttctccctggggctcttggactcaccatttcttcacttcctcaaagtgttcccccagtttttattttgtctcaattcctggcttcagcgagacctctgtcgaccaccttttctttccctccctccctacctccctcccttccttcctttctttcttccttcctctctgcctccyttctttctttccttcctccctcccttccttcatccctctctctctctttttccttccttccttccttccaatacatattagatgtacatattttgggctacttgatacattcatataatcaaatcaggataattgccttaaatatttatctttttcttgtgctaggaacatttgaattattctcttctagttatcttgaaatgcacaatagattgatgttaactatagtcacttcactgatctattgaacattaggtcttatttcttctcggtgtgtatttgtaaccattaaccaacctctcttcatcccctgcccttcctggcctctggtaaccactagtctactctctatcttcatgagatccacttttttagctcccacatatgagtgagaacatrtgatatttgtccttctgtgtttggttgcttccatcttttctaaaatagctgctaggacttcctcttctcctccaacctggcgagtccctttatcttctttggctggtttattttccttcctgcctgacattatattctatatacatttgttccagcatttatttctgtctctcctactagactgtaagcttcccgggggctggacgttttctgccttactcattgttgcatttcccggtgcctaaaatgatgtttgcttgttacagggtgggtgctcagtcacagctcttccagtgaatgaatggatttgcatgatagtcaagataagtccattttgatgggaaggaaacacttagatgacacaaagagtacttcttggtaaaaacaaagccattagagttgtagatgcatgaaaagaatttgaagaagattcgttcataaagtgtaaaagaatattcttcagaaacagattgaatatgtatgattaagttaatagattaaacataagtagatatctgagtatttcatctatattcctaaaagtttgtatattcatgttggtcagaaaactcttgggaccttcccttgggaaaccttatattcaggttgagttgcagtatgctagagcttatacagtcattctgtctgccaggcagtcattcccaagtacccagggtcagacccagccccaggtgtagggccacggggtagggaggacagagaaggggaagggaatcaggcacactgagcgtgtgctrtgtgccagaaactctgcctgggtttctctctcatgtgggtgacttaggagcaccccttccggggctcacgcagggagcaggccagagctctagggctgngcagctcgatctgacttctccaacccttgctacccctgtagttctcggagatcttctttgtgtccatctgcacatctgagttgtccatgaaggtctatgtggaccccatcaactactggaagaacggctacaacctgctggatgtgatcattatcatcgttatgtttttaccctatgccctccgccagctcatgggcaaacagttcacttacctgtatatcgctgatggcatgcagtccctgcgcatcctcaagcttatcggctatagccagggcatccgggtgagtgcactgggggtgtcatggtgctgggagggcaggccgtaggcccatttgcccccaagacactaaggaaataatgactctmctaccatcttccagttgttgagtccaacatgtgtggcaggttgatctttaccaatattatctcatttaatcttaaaacaattctaagaatggtattattagctccattttacagatgaagaaattgaagcccaaggtcacccagcggtgcaatgtcagagctgagatttgaaaggcgtgcctgactccagaggccacgtctgaacttttcctctctctcatgctgcaaagtgcctgattttcttatgctatgcatcctttgaactacatgcccaggacgccttggctttttggtggcccaggccactagctgctttccccaaacagctgagtctgctctcttgctggaaatagtctctgtgcttcgttaaggtggctctggaagggctactcctgctgagaagtctttctgggttgctgaaaaccatgaccaacactcccttgactcagaggcttcagaaagaacctcagggctgcccccctgccttgaatcgtgccctcaggcacttgtcctgtgcaccgtaggttcacctagctctgcacccagtgtccatccttctccaggtgggggctggtctgggttcccgtgttcagtcggggtgtgtcgtcctgtcctgccggaggctgcccctcgcctgggcttgggtggctggccgtctagggcctggccccacactctgggagccccaggcctgggtagaaaagagaaggggaacgttagaggtctcccctgctgcatacacacctttgtttgtttcttgctgtcatgtaaacaaacgcctgcctgtgtgtgtcccctctcaaacaacgcagtccagccctccctctccttctcttcatggcgaaccttctggggaaaggtgtctgtacttccagtcccacttccctgtccgtcatttatgccctagctgttttccctacactccagaatatctagcctctctgaagttgccagcagcctccttgtctccaaatccagtggccagttcccttggcatccttgtcactgctttctcttggttttcctccagcctgacttctcaggagcgtttatcctttgcctggctcatacacgctgttttctcgggatggtccctgagttctcctcctctgctccctctgcacattctctctgggtgatcttttccactttccaggaccctccacctgcctacccctctctctttgacctttagacccagctgccctctgggcatctcacaggcttctcaaatttgatgtgtctaaactgaagttgtcactcacccccatccccaacctcaaatcccaaaccctggcttcccctccagtatttcttttttttgttgtttttttaaaaattattctttaagttctagggtacacgtgcacaacgtgcaggtttgttacatatgtatacatgtgccatgttggtgtgctgcacccattaacttgtcatttacattaggtatatctcctaatactatccctccccgccacccctccatgacaggccccggtgtgtgatgttccccttcctgggtctaagtgttctcattgttcagttcccacctataagtgagaatatgcagtgtttggttttctgtccttgtgatagtttgctgagaatgatcatttccatcttcatccatgtccctacaaacgacatgaactcatccttttttatggctgcatagtattccgtggtgtatatgtgccacattttcttaatccagcctatcattgatgggcattcgggttggttccaagtctttgctattgtgaatagtgccacaataaacatacatgtgcatgtgtctttatagcagcatgatttataatcctttgggtatatacccagtaatgggatggctgggtcaaatggtatttctagttatagatccttgaggaatcgccacactgtcttccacaatggttgaactagtttacagtcccaccaacagtgtaaaagtgttcctatttctccacatcctctccagcacctgttgtttcctgactttttaataatcgccattctaactggtatgagatggtatctcattgtggttttgatttgcatttctctgatggccagtgatgatgagcattttttcatgtatctgttggctgtgtaaatgtcttcttttgagagtgtctgttcatatcctttgcccactttttgatggggttgtttgattttttcttgtaaatttaagttctttgagattctggatattagccctttgtcagatgggtagattgcaaaaattttctcccattctgtaggttgcctgttcactctgacggtggtttcttttgctgtgcagaagctctttagtttcattagatcccattagtcaattttggcttttgttgcccttgcttttggtgttttagacatgaagtccttgccatgcctatgtcctgaatggtattgcctaggttttcttctagtgtttttatggttttaggtctagcatttaagtctttaatccatcttgaattaatttttgtataaggtgtaaggaagggatccagtttcagctttctacatatggctagccagttttcccagcaccatttattaaatagggaatcctttccccattgcttgtttttctcaggtttgtcaaagatcagatggttgtagttgtgtggtattatttctgagggctctgttttgttccattggtctatatctctgttttggtaccagtaccatgctgttttggttactgcagccttgtagtttgaagtcaggtagcatgatgcctccagctttgttcttttggcttaggattgtcttggcaatgcgggctcttttttggttccatatgaactttaaagtagttttttccaattctctgaagaaagtcattggtagcttgatggggatggcattgaatctataaattaccttgggcagtatggccattttcacgatattgattcttcctatccatgagcatggaacattcttccatttgtttgtatcctcttttatttcactgggcagtggtttgtagttctccttgaagaagtccttcacatcccttgtaagttggatttctaggtatttattctctttgaagcaattgtgaatgggagttcactcattatttggctctctgtttgtgtgttattggtgtataggaatgcttgtgatttttgcacattgattttgtatcctgagactttgctgaagttgcttatcagctcaaggagattttgggctgagacgatggggttttctaaatatacaatcatgtcatctgcaaacagggacaatttgacttcctcttttcctaattgaatactctgtatttctttctcctgcctgattgccctggccagaacttccaacactatgttgaataggagtggtgagagagggcatccctgtcttgtgccagttttcaaagggaatgcttccagtttttgcgcattcagtatggtatcggctgtggatttgtcataaatagctcttattattttgagatacgtcccatcagtacttaatttattgagagtttttagcatgaagggctgttgaattttgtcaaaggccttttctacatctattgagataatcacgtggtttttgtctttggttctgtttatatgatggattacgtttattgatttgcatatgttgcgtcccataggatgcagccttgcatcccagggatgaagcccacttgatcatggtggataagctttttgatgtgctgctggattcggtttgccagtattttattgaggatttttgcattgatgttcatcagggatattggtctaaaattctctttttttgttgtgtctttgccaggctttggtatcaggatgatgttggcctcataaaatgagttagggaggattccctctttttctatcaattggaatagtttcagaaggaatggtaccagctcctccttgtacctctggtagaatttggctgtgaatccatctggtcctggagtttttttggttggtaggctattaattactgcctcaatttcagagcctgttattggtctattcagggattcaacttcttcctggtttagtcttgggagggtgtaggtgtccaggaatttatccatttcttctagattttctagtttatttgtgtagaggtgttcatagtattatcggatggtagtttgtatttctgtgggattggtggtgataacccctttatcattttttattgtgtctatttgattcttctctcttttcttctttattagtcttgctagcggtctatcaattttgttgatcttttcaaaaaaccagctcctggattcattgatttttttgaagggtttctttttgtctctctatctccttcagttcttatctgatcttagttatttcttgccttctgctagcttttgaatgtgtttgctcttgcttctctagtttttttaattgtgatgttagggtgtcaattttagatctttcctgctttctcttgtgggcatttagagctataaatttccctgtacacactgctttaaatgtgtcccagagattctggtatgctgtgtctttgttctccttgttttcaaagaacatctttatttctgcattcatttcgttatgtagtcattcaggagcaggttatgtagtcattcaggagcaggttgttcagtttccatgtagttgagcggttttgagtgagtttcttaatcctgagttctagtttgattgcactgtggtctgagagacagtttgttataatttctgttcttttacatttgctgaggagtgctttacttccaactgtgtggtcaattttggaataagtgcgatgtgttgctgagaagaatgtatattctgttgatttttggtggagagttctatagatgtctattagatctgcttggcgcagagctgagttcaattcctggatatccttgttaactttctgtctcattgatctgtctaatattgacagtggggtgttaaatattgacagtggggtgttaaagtctcccattattattgtgtgggagtctaagtctctttgtaggtctctaaggacttgctttatgaatctgggtgctcctgtattgggtgcatatatatttaggatagttagctcttcatgttgaattgatccctttaccattatgtaatggccttctttgtctcttttgatctttgttggtttaaagtctgttttatcagagactaggattgcaacccctgcctttttttgttttccatttgcttggtagattttcctccatccctttattttgagcctatgtgtgtctctgcacgtgagatgggtctcctgaatacagcacactgatgggtcttgactctttatccaatttgccagtctgtgtcttttaattggagcattgagcccatttacatttaaggttaatattgttatgtgtgaatttgatcctgtcattatgatgttagctggttattttgctcgttagttgatgcagtttcttcctagccttgatggtctttacaatttggcatgtttttgcagtggctgttactggttgttcctttccatgtttagtgcttccttcaggagctcttttaggggaggcctggtggtgacaaaatctctcagcatttgcttgtctgtaaagtattttatttctccttcacttatgaagcttagtttggctggatatgaaattctgggttgaaaattcttttctttcagaatgttgaatattggcccccactctcttctggcttgtagaatttctgccgagagatcagctgttagtctgatgggcttccctttgtgggtaacccgacctttctctctggctgcccttaacattttttccttcatttcaactttggtgaatctgacaattatgagtcttggagttgctcttctcgaggagtatctttgtggtgttctctgtatttcctgaatttgagtgttggcctgccttgctaggttggggaagttcccctggataatatcctgcagagtgttttccaacttggttccattctccctgtcactttcaggtacaccaatcagacataggtttggtcty

SEQ ID NO: 95902 - DNA, 39439 bp, Homo sapiens
  misc_feature (1)...(39439): n = A,T,C or G
ggacagggcagggccagagatgagggggtcagggtttctgtccttctctgctactagctgaccctttgacattggacaagtcacttcgcctctagtttccaacccccttgcctgaaaaaggagggattggaccagacaatcttgaaattgtcttccagctcttaagttctctgaatcttcatatcttctcttcttcctccatttcagaaggtctactactgatcttagctaatcttcccatcaccaaccttctctctatatcatccccctcactctggaaagagttgctgtgaagattaaatcgttagttgaaatcatttagaggaataagctttcaacttcctctacaactgtaacaaccttacctttatttattactttttgtgtttaaatttttgttttaaaattttcatgacttttaattgcacaagaaatatgggaatacatagttggagtaaaataaataaataattatagataaagctatagtcctctgcccgccatccccaatggcagcctcatctccagagtaaacactgttacctgtcttttgtctgcacatttacactcagacatacatttactcaatgtaatacataggattagcatgtgtggtcttttttggtatatccatggtatcatcatattgtatgtatatttctacaacttgatttttttcactccacagtatgtctgggagctctgtccatgccagtcagtacctatagatctacctcaatatttctcatagtatcagtgcaagtaatttctaatcctgtcccctattgatgggcatttaggttgttttcaattttccggttacacaagcaatattgcaaggaacatacttatccatgcctctgtgtgctcacgtgggagtgtctctctaggataactactaagatcacttactttaaaagttctttctacagtcttctgtttatttcctgatcatctcaccccattctcctctcacctcaaggaaaacaaatatgcccagtagtcaatgaacctcctatttgaatagatggcacctgggctgaagagtcattcctgtcttaggcagagattaacatggcccaggatgtctctagaggatggaattttgtcccagcgcttgctgccaggcagatgctgccatgcctgctgagtagcctgcgtcatgtgcccaacctgaactgtagccagttagtgctgtctaataaattggtctccaaagggggcaagcttctttttccacygttaggtaaaagccaagtgctttcttagctggcagtgggtgtggacatttttttgatcatgagtgaaagccaacagtgggcaacagctcttgggggtgatgggaagagcactggactgggctcaggaatcctggtttaaccttagacgagatatttaacccacctgaaccttgattttctcatctccaagtgtggatgacatgacattttgtccctgcaaggatgcgatgaagattaaatgagataactgtcctagcgtacctggcacagtgcctggcacatagtagataggccctcaataagatgttgattaaatctgaaatctgaaatacgtacagggtgattttgcaaaagatagagaattctattcaacctagcaaatctgagtacctacaatatgctgatcattatgcttaatttcttttataataataaaaaactagtttatgaaacagatgtgtgttaaagtaatcaaaagcactcaaagagatttaacataaagtgtaatacttattagggtattttggcacagtcaatttggttcatatttgtttataacaacttttattgagatataattcatataccatcaagttcagctttataaagtccacaattcagtggtttttcatatactcacaaaattttgcgagtatcgccactatctagtttcagaacatttcattacctcaaaaagaaatcccatacacattggcagtcacgtcccattccacctttctttagctcctagcaagccctaaatctactttctgtctctatgaatttgcctattctggacatttcatataaatataatcatataatatgtgtctttttatgtctgactgttttcacttagcacaatattttcaaggttcatccatatttagtatgttcagcattctttttttttatagctggatgatattcctttgtatatcattttgtttatctattcttcagttgatggacaattgtgttgtttctactttttggctattatgaataatactgctaccatttttcaggtattatgtgaacatgttttcatttatcttgggtatatacctggggatcgaattgttaggtcctatggtaactctttgttgaatgtcttgaggaacttccagactgttttccaaagtgctgcaccattttacaaccccatgagcaatgtatgaggattccaatttctctgcattcccactaacacttgttattatagtcatcctaggagatacaagatggtatctcatttgtgtttccctaggactaacgatgttgagcatcttttcgtgtatttattagccttttgcgtatctcctttggagaaatgtgtattcaggtcagttgcccattttaaatttgagttgtctcttttattgtagagttatatgaattttttaaaaagtattctggatataagtcctttgccagatataggatttacaaacatttcctaacattctatggcttttctcttcactttcttgacgatgttcttgaagacaaaaagttattaattttgatgaggtccaattcatttggtttttctctcactgtttgtacttctgctgtcatatctgagaagctgttgcctagtctaagatcacaaagacttacctctatgttttcttccaggagtttcatagctttagcttttatgtttaggtctttgatccattttgagttaatttttaataaatggtgtgagttatgcatctaacttcattcttttgcatgtggatatccacttgtcccagcaccactttttgaaaagagcattctttcccccattgaattgtcttggcacctttgtcaaagatcaattgactgtaaatgggagtttwttgctagactctcagttctattccactgatctatatgtctatccttatgccactaccacattgccttgatcaagaagtgccactcctctaattttgtatttacttttcaatactgtttggctagtatggatcccttgtatttccatatgaattttaggatccacttatcaatttctacaaaatggctgttgggattttgttagggattgtgttgaatctgcagaaaaacttgttatcttaatgatattgccttccaatccatgaacctggaatgtcttttcatttatttaggtcttctttaatttctttcagtgatgttttgtgatataggctttgcacttttgttaaatttactaagtcattctttttgatgctgttataaatggaattattttcttaattttattttcaggttactccttgcaaatgtataaaaatacaattggtttttgtatattgatattgtgtcctgcaaccttgctgaattcatttattaattatattttttggcgggttccttgggattttctatatacaagattatgtcacatgtaaatagaaacaattttacttctttccaatctgtatgtctttgattttttttctttttgcctaatagccctagctagaacctctagtagaatgttaaatagatgtgacaacaggagacattcttgtcttgttccttatcttagcaagaaagcatccaatcttttactattaagtatggtattggctgtgggctttggagggcagtggtgcgatcttggctcactgcaacctccacctcccaggttcaagcaattctctgcctcagcctccagagtagctgggattacaggggcccaccaccacgcccggctaacttttgtatttttagtagagacagggtttcaccatcttagccaggctggtcttgaactcctgaccttgtgatccacccgcctcggcctcccaaagtgctgaaattataggtgtgagccaccacgcccggctggaagtccccttctattcttagtttgttgaatatttttatcatgaaagaatgttggattctgttgaattcgctgattcactttgaaaaagtctaaatacaaccaagaaaaagcagctaggtctctgtacttattggcttatatctagaggcaaaagacagacaaaaaagtagctaagaaaaacatctgaacacctcatcctaatccttacactagtaggtctgttgatatgaatgaacaaatgaaccggtcatgtaaattaacttgtcaattaagcagatgagcgattcaggtaagtgtatagctcagtaggtgatggaaagaagggtgggccaactgaggcaggcttcatggagcaggtaggtattggaggacaggtggaatttggttagagagtgaggggcccttgagttggggctataacagcaaatacaaaaacagggatttgcttggggatagattggctagaggacagggccaatgctgggaatgatgagaagtgagaatgcaagaataagctaaggccaagtatgaagagctgtgtcaagttaaggaatgtgccttttatatggcagactgtaggagatctcagaacttgtaaagcaaaagaatggcatgattaaattgtcttgaggaaaggtaatctgataatgcattaagagatgggagatggggagagatacaggaggcaggagacctcatggaggccattatggtgactaggtatgagaagacgttggaattatgtgaatgtggaaaaggatggatagacaccagagatgttttaatggaaggcatgaagagagttagtgacaggtgaatgggcatgggctgagaagaagatgggtgagccaattgtgatttaaaggctgtgagcccaccaggtgactcggaccatggcagaaccatggtcaaacaaggaaaaatcaaaaacagacccttctggcagagacacacttggagactagtgaggtcagtctgtgttttagcagaggctccagaaggttgggaatgaaactttctttgactgttgtcagcatccaagctcccagggcactgagcacgtggcctgtggtggtcagagagccagcagatggctaaaagaagagcagctagcagccgggcacggtggctcacgcctgtaatcccagcactttgggaggccgaggcaggcagatcacgaggtcaggagatccagaccattctcgctaacacggtgaaaccctgtctttactaaaactacaaaaaattagccaggcatggtggcgggcgcctgtagccccagctactcgggaggctgaggcaggagaatggcgtgaacccgggaggcggagcttgcagtgagccgagatcgtgccactgcacagcagcctgggcaacagtgtgagactctgtctcaaaaaaaaaaaaaaaaacaaaaaacaaaaaacaaaaaaaaaaaaaaaaaaaaggaagagcagctagcccaaggagttaaacccagggcaactaaaccagggagcagctccccagacctggaggctagtacaggcgcaagtgagactgttaacttgagtccaagaaagcggatgctggggtgaatctgaagccatgtgaggctgaagggagcaatcaaacttggccaggtctacagaaggacttggacagaggcagaaaaccatgcccctccaggagggtgtaagggagaagaagatagagggtcagagagataggagaggaaggaaaaaagaggaaagcgcatgcatggaacctcattaaatcctcatccttatcctcatcctggcaggctgatcttatggactctattttactgatatggaaactgaggctcaagctaagttactttctcaagtttgcagaactagtaagtggtggacaggattggctccacaaccccactattttgtctaaccctggctgccccattgcagggctagaagtggccctcacagacctccagagctscagaaataatgtgcggcaccacacggaggagatcactgtggaccacctgcttgttcgccggggccaggccttcaacctcaccctgtacttcaggaaccggagcttccagccaggcctggacaacatcatcttcgtggttgaaactggtaagaaccccagctggctcacaggggctgtgtgtgtctgggaggggattttcgggggtttggaggtcgccatggagggcctcagctctacttccctcctaggaccgctgccagacctggccttggggactcgggctgtgttcagcctggcacgccatcacagccccagcccctggattgcctggctggagaccaatggggccacctccacagaggtgagcttgtgcgctcctcccacggcggccgtgggtcggtacctcttgaaaatccacatcgactccttccaggggtctgtgacggcctaccagctaggggagttcatcctgcttttcaatccctggtgcccaggtaaggctgggtgcccaggcggtgccctcctttctcttctgtcagtgctgccagagagacaggctcaagggtttctagaccccgctcccgggccacccagagcctcctcaattccctgcactcagcatccgccccaactaccaccaatcagggcaggaaatcttgctattcatttacttatttagaattttcaagttataaaccaaatcatctttgcttaaacagaaaaactgttacaattaagtttgatcgtgaataacatctaccttcatcatataattttaagttaactagagtatttttcgttataaaaggaacgaatgcactgcaytgagtatttatggaatgaaggaaagggtcaaaaaaaaagaaagagaaaagtgtaaagtaaaaagtaaagcctcccaatctctaagttccattcaacagcagttctattctttcagattccattcacctttaacattttcttgtgtagttttacaaaagtgttctatgcttaatcaaatatgtatgcctctgtgtgtgtgtgattctacaatacataccgtaagtgagattatgtaatacataccattctccagcttttttttttttttaatttaacaattcaactttgggcacattttcctatcggagcattcttcttagcagctacaattatttcactgtttggatgcaccagatatttttaactagttctctatgggcattttagctgtttccggtttttttttttcttcttcttctatagacaaagtaacagtgaatatctcacactacctgtctcacaagccctgacctctaaatctagttggggacagggctagatacataggcagacacaaggacatggtgtgggcagaaggggtcaggagtagagaacgggtctgctgtgctttgagcagaggccagactcccaagtctggcttctgacttaggggaccatccgcttcccatcttccctctctttctaccttctcccccagccttatcccaagggggcctcctgggtcacatcaggacccagagccctggatgggttctaacgcctctaaccactacccgcttccctgtccccgaatggctgagaatgctcacccatcagccaggtggagagaccctgccatgggatccaggagggccagtcgactgttttccctgtctctgtctcgtatctctctctctctctctctcagggccttctgagcagtggggagaaaagcrttaatgatggggccttctctcttgagcttgtgccacacccaggccccgggagacccaacactgggcctagggttggtgggggctgaagtgccctgtggtgctgcaggacaggagggtattggctgggaagcctcactgtgtagctcaggccactgctggccctggctgagagaagggggctgtgtggtctcaaccatgaacctgcagcttctcgccacactggcccaaaccctcaataaaatacatctcagcaacgacgcctcctgcaccagcctcctatcaggctgtgtctgaggctgcctctgaggagggcacctttccctcagggtcagacagagtttccagacagttmtaggaccctgcaaagyggacgtctgtgcccatggccttttgtttgtttgttcttaactttaaaaagataatttttaacctttattttagrttcaggggtacacatacagatttgctatgtaggtaaattgcacaccacagaggtttggtttgatgtacgcattattttrttacccaggtaataagcatactacccaacaggtagtttttcttttttttttttgtaatggtttcttttttttattattatacgttaagttctatggtatgtgtgcacaacatgcaggtttgttacatatgtatacatgtgccatgttggtgtgctgcacccattaacttgtcatttacattaggtatatctcctaatgctatccctcccctcttccccccaccccacgacaggccctggtgtgtgatgttccccaccctgtgtccaagtgttctcattgttcaattcccacctatgagtgagaacatgtggtgtttggtcttacgtccttgcaatagtttgctcagaatgatggtttccagctgcatccatgtccctataaaggacatgaactcatcattttttatggctgcatagtattccatggtgtatatgtgccacattttcttaatccagtctatcattgatggacatttgggttggttccaagtctttgctattatggatagtgccacaataaacatacgtgtgcatgtgtctttatagcagcatgatttataatcctttgggtatatgcccagtaatggtatggctgggtcaaatggtatttctagttctagacccttgaggaatcgccacactgtcttccacaatggttgaactagtttacagtcctaccaacagtgtaaaagtgttggtatgtctccacatcgtctccacacccccaacatgtagtttttcaatccttaccttcctcccaccctccaccctcaagtaagctccattactttcaatggcaaaatccacaattacttttgcaccaacctaatgttaagatatttttgaactggcttcaaaaccctctgttcatatgggcagcacgtatatgtgtatatgtataaaaattcatgctgtaaacattgttcataatctgttcagacttcatgtatcacatacagatttccacgtccatgtacacgattttgctgccttacgtctctatggtatgggattccatggtggagatgtattgaagctatctaactactccccaataacagggcatgtaggtggtttccagcttttcagaatcataaacagcactcagatgaacagcttagtgtctaaacctttgtgcacatatgaaatgctttgtctagattaaatgcctacaaaaggaataatgaggtcaatgccaacccttaaggtctggtttgctcttttccaaccaagattagtatagcagaaaaagcacagaatatggaatcaatcggctgtgttcaatttccagctctgtgctgatgtgtgatttgggcaatttacttaatcactctgagcctgtttcctcaaccttaaaatggggataggatgtaaatgtgctttgtaaaccaagaaattccaccaaagggaaatttttattattctaccttatgttcatgttgagcctgttgctggtgttgggagcatggactccctaagacccactgcctcgtgcccctcttggtgtcgccaggggcccttgctccagaaccgtttcctctgggactgtggggatgagaatggggcagtaagggaaaggtgacttttctgcttcgtgccctcccactctggttcctagaggatgctgtctacttggacagtgaaccccagaggcaggagtatgtcatgaatgattatggcttcatctaccaaggcagcaagaactggatccgcccatgtccctggaactatggacaggtgagtstcagccctgcttatggcccatcccggccccgagcttgtggggagagggagcagggcacatgtgagcttcacctagaactgctgaccaacgctaactaaatggcacgaggaagatgtgtgttgtgagcccaggttgcccgaggagcagccatagggagtgggagggcctttctctttgctgatcatgtctgatttggacaacaagagctaagggtaagggcagttaaaggcacctcacccaggaattccagtgagcatgagggtgaagatggaaggcatggcaaccatcacagcagtgatgatgcccggcattttggttcattaaactgtttttccactggggtcccattttccactctctcacttcatgctcacaacccttggtgactgacccctagcatcagttctgtcacaccaaggacaacttgtcccctgaatgtctcagccagaagcagggctgatgagcagcaatgcatctccctccccatggctactgtctctttatttctgtgtctttttgatgatacatctttttaattatgaaagttaatacatgcttgtttaaaaagatttgcaaagagacattacaaaaatggatacatgaaggtcatcccaagcaccatcaccagcttggtgtatgttcctctacattttgttttctatacgcattctaaaacgctactttatacgtaaaaataacgtcatattaattgcaatgctctgcacctcctgcctttctaaaagcctgcctctcatttcaaattcagcctgcagcagggacttcaggaagtccagtgccaggcaaggaagagggctcttgatgctgagccccagtgccaagagcactgtgggagggagaggatcagccctcagcctctcagaaagctgtcagctaggaaaccctggggatcctcgtggagccttgtctcagcttgatatgaattcctctcctggacctgcccaaatagaactccaacatatgtgtccttccagccccagcctgggcccaggggtggctctagccaagatgagatatagcggcctcaactggccccaactcacatccccaatcctcactaagcatgggcagattgggcatcatggagagacctggacaggagtgggctgccatctgtaagaaacagaagagaggggttgctgctttctcagacctgggtccctctgtttctgtctttcttttgttgttgttgtcttgctttttgtttttgagacatggtcttgctctgtcacccaggctggaaggcagtggtgagatcatggctcattgcagccttgacctcctggactcaagtgatcctcccacctcagcctcctgagtagctgggactacaggcatgccccaccacacctggctaatttttttattttttgcagagacgaggtctcactatattgcccaggctggtctcaaactcctgggctcaaatgatcctcccgtctcggcctcccaaagtgttgggattacaggtgtgtgccatcgcgcctggcccatttctgtctttcttcttcattaaatatatattgatcgcctgctcagtgccaggcagggtgctaagtgctagagatatgaaaatgaatacaacattgtccctgatcttacagtgtaatgcggactcagacacataaacaggtcacttatcatgaatatgtaaagattgagagacaggggcagagtgttctgagagccaaggggaagagctcttggttgggcatgggagtatcatagaagcttcctgggagaggagatgtttgaattgagttagccaagtgaaggatagtgggaaaaacatcccagacagagggaaggtgtgagcaaagacacgagggtgggaaacggtttggcccgctgcagacatttggtgttgctggagaaaaaatggtagggatgggggcggagggcaattattgatacttgaggctggagaggtaggttggggccagatctgggaggaacttatgtgccttctgaaggaggtcagagctttgattctctaggctgtaggaggcctttgaaaatttgaaaacagaaaagtgagctgatcagactgtcctctggggaagattgatcagagaagcctcctaattctgcatgttgcccagtgttacacaggaataaatgtattcatttacactcattctacaaagaggtacagagttcctgcaatgtgctgggcaccatgccaggcctaaggtccagagttgtgaagagagctggactgaaacagccccgagactcaggcaggaaaagacagacttgactacatcacgtaactgagtctcacrcggagagggsacatacccagggctgtggcgctaaagcaggctcaggctcggggaaggcctcagagggagtggcattcacaccaagtctgaaggaccaggaggagccagcctgccttgggtgggaaattttcataattcacatgcaattagtcagcctagagccccagtgaatcacaggtgccatggcaggttggcaccctcacttcagcagtagctgccaatgctaagctgggtcagcaggtgagtgtggaagcaggggcaatgtggttttggcaggaacaccccctggtgctctaggagtgtgggaactgagaggagaggaggagccttttcaatcagtcagactcactggggaaaaaacccaaacaacccaggagtagcaatagtcatctcggagtgaaggggagggatttggtgtgcagggcatatgcaccaggtgaattgtgaccctagagttttgaaaccccacacctgaatgggagggaattcatggctgttctstttgacacagttaccttccaagtgagtttatattccactagggttggggggaagtcattactttttacatactcccacgtgacaagcatgggtgccttccctctctgcctctcccccygaagtttgaagacaaaatcatagacatctgcctgaagctgctagacaagagcctgcacttccagactgacccagccacagactgtgctctgcggggaagccccgtctaygtcagcagagtggtgtgtgccatggtgaggtccctggcgtgccckgggagggaggaagctgtgcagcgggagccctgcccactcacagttgccccctgcagtgggtgaaagagggaccctctggcaaagccatcttggatgagactgacgccagaatgtgggtgacaagttttctcagccgagctctgaaatagctgggtgtgggtcatcacctctattaattccaaattgcatgttttgagaaagggtgagtgtagctccagtttgggaaatggtcttgttgtttctaaatttcctcttttctgaagtgttttttaaagctctcagaggtaagctccagctttgcaggggatgggaggacatgggtaaggggtagataggaacataataataaactaattcacagtggagcaraagtcagaagagtcaacccccatccttagccctccccagcaggtctggaagtccacagtaaaatgctgtcaaaagtctctcctctgtttctcaggcccatgggtcttccaaggcagcccacacatggcatgttgaggaaatggatgtttctaacacttctctatatggcttctcttcagatcaacagcaatgatgataatggggtgctcaatggaaastggagtgagaattacacagacggcgccaaccctgcggagtggacgggcagcgtggccatcctgaagcagtggaacgccacaggctgccagcccgtgcgctacgggcaatgctgggtctttgctgccgtcatgtgcacaggtaggaggtagaaaggaccccacraaaaggtcagaagtatagccgctcatgtatgagccttctgaaccattcccatcccagtcccacacagttcccaccaagggacatttggaaggaagcccttttcctctctgaaatgtctcggccgggcacggtggctcacacctgtaatcccagcactttgggagcccgaggtgggtggatcccaaggtcaggagttcaagaccagcctggccaagatggtgaaaccccgtctctactaaaaatacaaaaattagcagggcacggtggcaggcacctgtaatcccagctactcgggaggctgaggcaggagaattgcttgaaccygggggggcagaggttgcaatgagccaagatcacgccactgcactccagtctgggtgacaagagtgagactccatctcaaaaaataaataaaaaaataaagtgtctcatcacggacctcagactgcacatgtctgggcttatgtcagaccatggttccgaagtgacagtcacacgtcccaggacgcctgacacccttgcttcgtctaagcttaggcaacttaccagcatattcctaagagcttggctgggaactgtctaggttcaagacagaaatgagatgagaggctgagtaattaggaaactacaaactgattagtgtcctttctgagcacagagaatgggctcaatgaagatgtgtacatggaagggaaacrtgagtcagggctgtggtgtgggccatggggccagagcaagatggcaacccaagggaaatgaccttgaatttggagttgttgagggcctgatagcctgactctggccagagggttaggggaaggaagaaaatgtgaggtcagcttttcagataaggaatggatactacattagtagaggaaaaactaaaaaatacatatgtggaaaagatggcaaatggaagttggtttgtgggtgacaagaggaggagatgaggaggaaatcatgaggggagtgatacttggaaatgagtcacacatggaggtgaaaggaggaggccttctgcctcacccagggccaagcacttgctccgggtcctcaccctcaccctgccccacacccaggcctgctctcggcctcttggcttgcgcattctgatttgggtggcgatcagaaggttatttattgtgttaagctggggagagaagccaagcaaggttttcgctcacaggattctttaggggaatccaagaataccagatctgcccatagcttggtgtttattgggggctcaggccttctgggtagaattttgtgtgtgacaaagtttgttgcatttcgtgtgcatatatgtgccaggcccatctctgggctgttggaagaatgcaacttccctgaaggaagctcagagagccccaggcatctgtccaagggcacgaggaggtgttgccaccgagagagagtgactttgcacagttgatgagaatgatcagtaagccccaagattactcctctgcagctgcagagccagctcttgagttggatgagttgagttggatgagttgagtgcccaggtataagaaacaaggaattccacagctttgagactccatgtcatgaatatttgggtgaagtgagaggactgagtccttcaggaagcaagcacaagactgacaggtagagactagatcttgtataagatagagagrgaaccttccaktgtgtggaaaagcctagcatctaatgggccaggtatgtgtgtgtagaaggagtgagccaggtttgggtgtggttgtctggaactgcgtgatgagagaagtggagccagtgaatggagattatgcaatgacagtagaccaattaacatgtttgtgagaatcatggccctttagtggcctggaaaacaaagggttggtcaaagtaggtcaaacgtggcccagtcccctgtagctcaatcagcactaaccttcccccaaagagctaccatgttataaattaagaaatacagcagtttgaaaaactcatcccttcacagcaatacttactgagtccttattctacaccaggcactcactgtgttccaagagctcttggatacaagatgggtaagacccagcttctgtcttcaaccaaagttaaaattaaagatttagtcaaactccttaacctcaaacagttcccaaagcatgttttttgaaaatatatatgttattatttcatagccatagtaactaatgtttattggggacttcctttgtgccaggcactgtgctaawaccctgacagcctagagtagtggagaagcttgtggactctggaggcaagatgcgtgaggttgcataccagcactaccattaattggctgagtaaccttgggcaagtcatttaacttgtgcctcagtttcctcagatgtacaatggggaaagtagtggtacctacctcataggattattgaagggattgagtgacttcatactggagagtgcttagaatagtgcctggctatagtgagtgttcaggaakcatcagttagggtcctcttgtctgatcccctaaatgaccttatgaggtgggacctatcatctccatttttcagaagaggaaattgagtggtggagccagtctcatacccaagtctggctggctctgtaagccatgtgctaaccatcaggccataccacctcatgaacattgctagcagctgccattaatccagcaccaagtccctcaggaacacactggacrctttcacttttactaatcctgaccaccacctgcaaagtcgatatatcattatagccatttcacagatgaggaagcaggcttaaagtgactgagggactctggtctgactcagacatgcatctcccctctacggccctgcctcccagtgtggcctttcaacacgttgacacattgacttcaacttcccatagaaaaaccacaaaaggaggctttgcgtgcctcaaagatgaggttatagtttttgcacatccatttagttgcctgttacttgagaattttagagaactccctgscctaccctttctgtgcccagggccaggcaccctggagttctaggccctcaggctcttcctgttctggcctttcactctttgacaagattggaaccctcagccctcggctgaggtctgggaagtagcctggatgcctttcacgatagcaagagtacagaggggacagtgatgttctgttgcctgaaaactccccaaaagccagctgtgaaaaagccacatagtgtataatttcatacatatgaaatgtccagagcaggcaaattcatagagatagaaagtagagcgtggttgcttagggctgggaggaggggatagttgggagtgactgctaatgtaatgaggtttccttttgaggtgaaaatgttttggagttagacagtaaagattgttgtacaacctgtgactgtattacaaaccactgaactgtccactttacaaggctgaactttatggtatgtgaattatatctcaagaaaattatttgagaagaagccaggcatcctgggaatatgcctggtctattcttgtccataactgcctggggttggaagtggggtaggggacagcaatgacttgggctgagggttgggaggtactaatgtgtgaccgtaagcaggtgtacagcatcatccctcttctgtaaaataaggtccaaggtcccaggggctgtaaggggaaggggaggtaggaaagggtgtgggcgatgggaggctgcctggttgggactgggactgggccctcttaaactaaagcaacccaacttgcatgtcttttatacatcaaatcctcacttatgattrgtttgcatatagggccctctgcttaatacttttttgaaaacccctgagctagatattatctaagatttttctaactcaattatgtaggggcctttaaaacgtatctcatcttcatttcaatacaataactcttgttctcattgtttttacccttaagtctcaaagaaggaactgcagccaaggccctggtgcataccccagccttttcttagatcccagttcaaactcttttgtgcagtgccctggactaaacacaaacctttcttattttccattgatttccattgacataagatagtacggaatgttccctcgtaaggttgttgactaatacatggagagtagatagaaagatgtctggcccataagttttatctaaatgttagctattataattagtctggtactgttttaatctctgcctcttgggctccagggctttggctgggtcttattcaaaagttgtttcggccaggtgcagtggctcatgcctgtaatcccagcactttgggaggccraggcaggggaatcaccaggtcaggagatcgagaccaacttgactaacatggtgaaaccccatctgtactaaaaatacaaaaaattagctgggcgtggtggtgggttcctgtagtcccagctaatcaggaggctgaggcaggaaaatggcatgaacctgggaagtggagcttgcagtgagctgaaatcaggccactccagcctgggtgacagagcaagactctgtctcaaaaaataaaaataaataaaaaagttgtttctagctatccctgaaacttcagttcccctctctcccactttttttcccttttatttcctttctttcttggaatgtttagagttaactatattcctcatttcatggcacttaccataattggtctgctcaggcccctctttgtaaaaggcccttcttattaaaattaatttcccccttttatctcatagcccacttccattcacctctctgcatgatagggaaacattttaatgtgtttaatatgtagcactgtagttggatgtgttttcgcaaaaaaatcatattattatctttgtgcagtattttattcagtatggttttggtttcatctattgtatttgtcttttgcatgcatatgtatatagttttatttttgtttattttttagggctagtcaagtgaagcagtgggaatggaaaaggaacaaagaaatctgtaacttgttgtgatgaattagttgtaaacaccactgcacttggacccgtgtgtatttttcatctttagaagttccactgagtcttttttttttttaccttccatttctcttctcattatgtttttgtttttctataactccctttgggcattttgagcatatttataatatttaaaatagctctttgaggtccttgtctccttttttttttgaggtcagctttttaaaaaataatttcaacttctattttagattcgggggtacctgtgcaggtgtgttatgtgggtatattacatgatgctgaagtttggagtatggatgattcgtcactcagtgctaatttcattgtctctggcatttctgaatctggttctattgattaatttttctactggctatgggtcatatttttctgtttctttgcatgcttgcccattttttattgtgttatgctgttgataactggattttgttttattcctttaaaggactttgtgtggtacagcaataacaaattccttgcagattaatttgagcttttggaggtttgcttttttttttttttttttttgagacagagtctcgctcttgtcgcccaggctatagtgcagcagcacaatctcagctcactgcaacctccacctaccaggttcaagctattctcctgcctcagccttctgagtagctgggactacaggcacccaacaccacgcccggctaatttttgttcttttagtagaggcagggtttcgccatgttggccaggctggtctcaaactccttgaggtttgcttttaagctttgttatgatggctccagagcagtctttaccctaagcttaatttagccccactactaagtcatgcctcttctgaagactcttatcaaatgccctatgtattatgaggcgtctccactctattgctttatctggcctcctggaatttcatccccatgcttgcacagattaccactcagccaaagacttgaaagacccctctgcagatctctggaatactctctctgttcagctctctcccctccatacactccatcctgcaaatttgagccatcttagcttccctcaattgtgatctcatctcgttaacttgttaagactgctgagttctttctgggcttcccgagcctgtgttgtggcctggatgctgctctaggaagttcctcaattgcgatttgtctgttattgttctcatgatcatactagaagtatgtattttggggaggaagacaacaaaagtagtgcttcctgctcacataatatcaagggtgcctgctgtcaatacgacttatcactgttgatgttgaccttgatgcctggctgagatggttcagtctttgctagcatgaagtggcgggggacgaggctacaggctgtgtctgtacagtcagtttgtccaaatcaggatctaattaggaaccaaacattgcacctgattgcaatgtcctctgtgtctcctttaatatcaaagagatcctttaattcaatatgtgacttttttgaagacactgagacagttgtcctgcacaactctaccttttagacttgcccgagggcttcattgtattgttggtcttatgcctctgttctttgtattttgcaactggaagttagatataaaatattcatattaaacattttgactagaggtcttttaaagcagtcttctgattgtccatccccacacaagcagctgaaatttttgtcttttctctgttggtccaggagactgacttgtgtgaggatggagggagtagattgtagtgctcattgtgaaggggccttttttgccatttaagacccccccccccaacacacacacacagataacccttacaaatctgccacagagccacagagcaggtctcacagctccatggcaactgcccagtgccatcttctgcgctgccattttcatctaatacatgacccaggtcctacatgctgtgctttgctccttcaaggttgatatccttgtttccatttcctatttctctgtaaacagtgctcatttgtacttcttgagtaacaggttattgcacttcgatgacgagggttcagttcttaattgcccccacccccttatcaaaaaataattttggtagggccctgtcttagtgcaggctagaagaccggagattatcatggaaaacagatggtatacctttgcatacttaaggtactattaaggaaacaaataagatttcatttccttgccattacaggtgagagagaacagttcaaatatgattagtgatggcatatctgaaagaccaaagcaatatgatcatcttggttataagggacgattaaaggcatgggataaagagcaggaagtgatatatttatcatttggaagcttaatgcgttcagggagaaattaaaaggtgataaaagtcatcacatttatactcaattactttgactctaagagctggagttttggccacatttctcgataaaagctatgggagtgtggcagtaaagctaactgaatgcatttcaataaattgaactctaactttccactgaattttcttataaaattagggccacattccacattgcagcaaaaagagctttacagccagtcctgaaacatactagatattttattttattttattttagacaggatctcactctgtcacccaggctggagcacccaggctggagtgcagtggcgccattatggctcactgcagcctcaacctcctgagctcaagcgattctcctgcctcagcctcctgagtagctgggaccacaggcatgtgccactatacccggccaatttttttatttttttgtagaggtgaagtctcactatgttgcccaggctggtctcaaactcctgggctcaagcaatcctccctccttggcctctcaaagtgctgggattaccagcctgagccactgtgcctggccccatactcatcattttaatacaccattaggacatggtccactaccagtcaagtgaaattgtattcctcgaaggcaggaatgtctttcatttttgtatcctcttcatctaattgactacctggtctcaacacttatcactgaatgactactaaatggctgaatgaagaaatgtaattactaatgctgagaatgcagtgtgatataccttgataactctgtggtcccttcccaactctgagatctcgttcacctttgcccagttgtcactgcatcagtgcatgtagtgtatgcatgtccataagcacagatgccacacatgggtttctctttcacgagggactcagatcccacaaaatcatcagtgacaggtcacctaaatctcatgtcaaactgtgagtcatcaggactgatagtctgcagaaacaggttaaaggtgcctcactttaacaggaatataatgagcacctaccctgtgcccagccttgtactaggaatgtagaaatgcaagaaaagtcttatatgagctcaactctagggggatttgtaatttggcagacaaggtaagacagacacattaaattacagagagccgaatccagtgctgaaatgtgtgacacaggcgatcagggttatgtgagagcatgagaagggatgagtgcggtgtggagtcattggtgaaaacttcacagaggaaggtgcattgagactgaggtgtggctgggatgtccaatggagttacagtgttgtggcctgcagttaaaagcatgagaggctttgagatcagagagacatgggtttatgtcctgccctggtttttctcttcctgccctgtgaccttacctctctaaacttcaggtgtctcatctttaaagttgggataatcatatgggtatgaagaagactaaggtagataatccttgtgcagtgcttggcaccatgcctggtacctatgatgatgatgatgtccttgactagaaaggaagaccgagaaggctggaagacaataagttcagtaagggatgtgttcagtgacagcaaggtctctagacaggctcaagattcaaattcaagagtcctgggcacagaagtgggagagaaagccatagtcgggatgagctctttgtgggaggacagaaccagaaggacagagctctggagcaaggcccctggaaacatgtatgtgcatgacttctggtgaacagatctgagtgccttgaagctgatgccttggcttcaccccctatgtaagaaaccattcttgcccctctgtaacttcattctgttctactgtgacaatctgctccccatccaagtcctctcacaagccatgatgagcaaagggtgagactggatcagtgcaaatccatcaccactcaaagcttatgctctacggacagttgagcttggtacccaaagcatatcccacaaccatcaggatagtggtgagttgaactcagaaatcaccagaacaggcaaaagattcacaagacaccactcatccatccatccagcaaagatgcagcaagatgcaaaatgggccttgccctgtattgttaatggttgagtaatgataaagatgaataacacacaatccctgccctcaggaagacagactcataaacaattcattacaagcctcatactctggttaatggagaacttcaaagtgcttcaggaccagttacctgtgttagggtgggaaagtgcccatcgagtcatgtttagcaggagttgacaccactattgacacttcaggtggccactcatgaactcatccatctgggtgaagggcagggggaggcttgctccctgctctccctccctgccctcttctttggcacgttttcttgtcactgtgagtgtcatccaccctcctgactgtactttyagcataaatgcgcccctgcaatgctgctctcttgcctcactgctgtctcagggtccttcagtgacagcttttcaaacttcagcctcacctctgcagctgtcctgtgtcacctccacctacaacccactygtcagctctacccaccacctgccctagttcttcagccctgttcaracctgccacgcgagctcaaggctccctttgggcttctcccctcccttttctggtcgcatccagaggcctgtccccaccctggcctggagaggctctgtgtcaaagtgcagaataagaagagggtgagctaaaatctgtacacaattaaatgtttaaactaaaaattataaacttttaagaaatgacagtagtgtgtgtgaagaacccttagaaataaccatatttttgactcagtcactttaccccttagaatatgtcccaggggaggggggatattgatctacaaaggtatttatcacagtatttacaacagggggaaaattgaaaaccaactaaatgtttcaaaataatcaccactaaaatcttgctttcggcaaatattcgataaaataggaaaatgcttaggatgtaaaattaggtaaaaacactaagatgctgaactgtatgcatactaccaaaagctggactcagtattgattgcaagcttagcagtgaaaccaggattttagtggtagctctgcctcttactagctgtgtgaccttggtcaaggtagcaaactttcttagcctctgattctttgtcttcaaaatggagataataatagtagccatcagatagagttgtcttaaggatactatgtgtgaagcatttagcactatgcccagctggtagatactattattgtcattattagattgagtggactgtcattgctggacatgaagggacaggaatccccagagcatttcatggtcagattttcctgtacttaaaagagcacagaggccgggcgcggtggctcacgcctgtaatcccagcactttgggaggccaaggcaggcggatcacttgaggtcaggagttcgagaccagcctggccaacatggtaaaaccccgtctctactaaaaatacaaaaaaaaaaattagccgggtgtggtgttgtgtgcctgtaatcccagctactcagggggctgaggcaggagaattgcttgaacccgggaggaggaggaggctggagtgcgatttttttgacttcaaaaaaaataaaaagcacagaatggaaatacagcagaggataaagaaaggaagttggctggcaaacagaatgcatggcccccaggaataaagacaacactctaccttctttcaagaatttctctaccaggtagaaactctcacttttctaagctcttgttacatggttttctttcctcttggcttaatctatgatgcttttctagagaggcttccaagatcatatacccaggaaaagggggaatcaaagccacagaatattttgcttgagaatctgatggtctgaagcaataatcctaactacagaaaggaatggaattccagctttggcttgaagatggagatttagggccagaagagaaatgcagttgagtcaggcctytgagttttgccaaaggaaaggcttgccagtcccaccctcctggcgtaagcagagctcacagcttgctagactttactggctcaggcagtgcttgtctgagcagtcagcatccccacctttgcctagaatctctcccatgagctccagaagtggggaaggaagttggaaatatcactattccagtgttccagacakctccagcatgttcctgcagatggcaaatggaagatttccccaggtccaggccccaaagtccaggaatatacsggtccggaatctacagctcacaggtgatttttttgtgccctttttgcagtgatgaggtgtctggggatccctacccgtgtgatcaccaacttcgactctggccacgatacagatggaaacctgatcatagatgagtattatgacaayacaggcaggattttggggaataagaagaaggatactatctggtgagaaacaacctctcaacctatttctagggccacacatcagagccaagccccatggcaggaggaagggcagaacgaggtccatgagcctggtccctccccttcacctcctccacaccccctcaccctcccccacccaccccccaccaaggctgtccccacacctcttgccaatcttcagctgggagacatctgaacaaagcccatttggggtttagaagtctcatatcataagagtgttctgccctgggttgaggttttcatctttgtcacctccatcacagaacctcctggctctatggggcctggagaaaatttccccactgccctttgaaggtttgtttaaaaaaaaaaaatcaactcacaaaatcagatcaataggagaaaaggcatacacattaattaacgtatatacaggagccttcagaatgaagacccaaagatacaggggaaattgtccatttttatgcttagtctaacagagtatggacagccatgtagaaatctgcttggacaaatggtatgacctaatggtaatagactgagtggggaaacccagccctgtttgtctacattctgcttggcctctctgagcatgagttccttccttcccaatatggggcagaaccctctctagaatgagggttttttgacctacagtcaaacaaggtaggtcagataaattttttatggccagtttttatacaaaaaggcagaaggaaagctagggtaatatttttaggttttaagactgcctttggggaaaaggggttctggtttccatgaccttcccaccttggggaggcgagattttaatttctatgcctagccatgggggtaaatgagactgagagacaggaagacaggaaaaggtccaaaaaaacacttctgcttctgagaccttcattttggagtattgtttcctgagtcccaacagttctgaccacaggacggccttacctccgaatacaaagaccacgagtgcctctgtgagtcatcaacgcacacaaaggggccacaaagactgtttcatgagacagtgaaggatttttaacttcagtggactctggaagccttcactttctgttcacaagctgagtccgcagagggagactcttttctgggaggcaaagagaggtccacaagaggaagacctgtcactaattaattacttttttgagacaaggtctggctttgctgcccaggctggagcacagtggtatgatcaaggtcaagccttgatctcccaggctcaagtgatcctccacctcagcctcccaagtaggtgggactataggcatgtgccatgatgcctagttaatttttttttttttttgagacgagatcttccttttttgcccaggttaatcttgaactcctgagctcaagcaatcctctcacctcagactcccaaagtactargattactggcatgagccatcgtgcctggctatccacagaggttttaagccctgtgtgtgctaagtctgtctttctatccaacagttcatttgctcatccctcccttgccttgttctagaaagaccaagcagtacaacgtctcccttggctctgtttgacacaggaacttccatgtctggaatgagtgctggatggcccggaaggatctgccccctgsatatggaggctggcaggtgctggacgccacacctcaggagatgagcaacggtgaggctctccagaagaaaggcaggccccgctcccgtggaaagcaccccacccctgcccagccctgcaacaaacagcccaccgaggctcccctgttctycttcaggcgtctactgctgtggccctgcctctgtcagagccatcaaagaaggagaagtggacctgaactatgacacgccctttgtgttttcgatggtgaatgctgactgcatgtcctggctcgtccagggagggaaggagcagaagcttcaccaggacacgagttctgttggcaattttatcagcacaaagagcatccagagtgacgagcgggatgacatcacagagaactacaagtatgaagaaggtaagtaagcaagccagccctactcagagccccagccctgcaggaaccttcccctaccccagggagccagagagcatctgcgaggcaggacccagccccactgtctcctcagctgttcagttttgaggccccagttggggtggcctcacagcctcacttcttcatgacacccccaccccacatcctgcaggccagcgagctcccgccacaaggcgctgacatggaccgtggagcccaaacagaatatgaatacttcacccctgcttccccctaaaatcagcctcccactgaagatggcagggaatttagtaaacactctgccattcatttattttatttagggtattatttaattcactgtgtttcastgagtctttggaggacaggctgaagtgagcccagatgttcactcccaccactcctccctgtgggaacggcacggccagaggctgactctgaggtgacagccctggcagcagggtcacaggggaggctgtgttagtcagctatagatgaatgcctggacattgagaagcgccagccactaggttcaattaccagggagccaggcaaaaatatccagtccatgagggccagaggcagggtgagggccagagctgggatctggctggggaggatctgagcaggtgcmaggcagggtggctgaagggcggtggggagggctgagcagttgctgggagtgctggtgagtgggtgtctgtggttcgtctacgtgggcctcggggacagacgcagggaggctccagaattccccacctgggaaggggatttgcagtagggggcaagtgttgaacacagcccagcagtgccatcaccacccactccctggggcctccggcctcatcttggctgggctgccccagaaatggatcctgaggcaagcattcaaatacaggtggtttattttttaggctatcctggaaatcctggagcagagtgagggagacagggaagggaaggaagtggatgtaagagtacattttcaagcctgttagcacagtgacagctggctgggagctctggaagtggggttgtcagagaaaataaaggacaaataatgctttagcataaatttgtcccaggccaggagctgtaagctcacacctgcaatcccaacactttgggaggctgagacgggaggatcactttagcctcagaatttgaggctgcagtgaactatgatggcaacactgcactccagcctaggcaatagagtgagacctcatttctaaacaaaaaaaaaaaaggctgtcccaaattatttgttgtttatttgaaattcaaattaaattgccttgtatttttgtttgctaaatctggcaaccctatcactgattcggtgtgaagtgtagaacaatactgctgatttatcacaccagagagtcacaggggctagggtgtttatccatcaactcctgttggtcatgagttgagggctgttcctgggggatgtaaattctttagcacttctggcctgccccatgcatgagctgagtctgctctggtagcagagaaaacctcagacagagttgcaggggctgcaatttgaaaagtagggcctgtggacactgaaatggcaagtgccaagggaatatgggcagggctttgatggcatttgctagagaggcccacggggtcccctgtggactcagggggattggagccatacccgagtggacctgagtgtcctgcttaggtgctcctcaggccagcagtattcagtcttctcccacccagcctgacagggtctggggtcgcacagaccgcagatgcgctaaatcagattcccatcttcctgggcccactcttttttttttttttttttttgagacagagtcttgctctgtcacctaggctggagggcaacagcatgatctccgctcactgcaacctctgcttcctgggttcaagcaattctcctgtctcagcctcccaagtagctgggattataggtgcctgccaccatgcctggctaaattttttgtatttttagtagaaacagggtttcaccatgttggtcaggctggtctcgaactccagacctcaagtaatccaccctccttggcctcccaaagtggtgggattacaggtgtgagccactgccctcagcctgtgggcccactcttactgaagcaaatgtctccagattctcttttgtctggaactggccttagaatgaaccccagagcaaggggataaaagtggcctctgcctcaggaagttgtggcaaatgcattgaaggggtagagctggtccctggggatagtaagtactcaacaaaagcagcttctggaattatgaggcgtgggcaagtattcctgcacatgcggcccacagggacccccaggatagagcagggaagctggggccaccctgggawctctgcacgcctagacctcctctcatatgtatttacttatktactgtgcttctcctttcccttagtttccaggaattagtctatgcctgaccaataatctggctctggaacaggacatcacaccatgccctgctgtctttatgaggtttatttctctgcatttgtgggccttcatctttcccttgaggagatcaggatagagttgagcggtcacaggcacgggttttagagttgggcaggtttgcttcccacctgggatctgctccttactagttgtgtgacttgggcaggtgacatgacttccattagcctccttttctttatctgtgtatggaagaagaagaagaagaagaatgctaatggtaatacaccttgcttgtggttgatacaggaggaagggtgtgaagtggccagcagagcctgcctgggaaagcacatgaggagtggagggagtgcttgttactgggagtgaaggcctgaagttgttggtggagatattgggtgggggatggcgctcagcctcagtctaccccggtcagcctggctcacagctggtgctgtgctctccccaacttcaggatccctccaggagaggcaggtgtttctgaaggctctgcagaagctgaaggctagaagcttccatggctcccaaagaggagcagagttgcaaccttccaggcccacatcactgagccaggacagccctcggagcctgcatacaccttcccttcgacccagtgatrtggtgcaagtctccctgaaattcaagctgctcgacccgcccaacatgggccrggatatatgctttgtcctgctggccctcaacatgtcctcccagttcaaggacctcaaagtgaacctgagtgcccagtctctgctgcacgatggcagccccctgtccccattctggcaggacacagcgttcatcacactctctcctaaagaaggtacgcatgtgcacagtttgtgtacgcagagttggttttggcaatgtcagtggggtcaagccagccaacagggttctgggggcagacccctgagacaccatcatttctactgtcccctctggcacgattcccctccttccctcttctccttcccccttccttccttccttccttccctccctccctccttccctccctccctctcttccttccttcgttgtatctcctctctccctcctttctcttcctcctcctttcctaccacaacaaaagtagctggttttgcagaaaaagcctgagatttggagtctctgagaccttcgttggagcctcagctctcccatttcctagcagaatggccttgggcagccattttggctcttttcagctcatttcctcatctaaaaagctgccacctgcttccctggganttggtacttgttgactttctcttctctgtggaagagagacccaggtccaacccaggtacggctgattttctcagctactctcaccccatccttgtgttctttctttagcaaagacctacccctgcaaaatctcctattcccagtacagccagtacctgtcaacagacaagctgatccgcatcagtgccctgggtgaagagaaaagcagtcctgagaaaatcctggtgaacaagatcatcaccttatcttatccaagcatcacgattaatgtaggcaggagtcctgcaaatggcttgtggggctccttggatctggcggggagggggtgaagccctgtgagagggcagcctgggcctgcttaggagagcatcccctccttcctttgcctcttctggtgctccaggagggagaagtttgtctgagagatcttcatcctcttgcaccactcactagaggccctatggatgggtccttgagcaggtgccatggacaataggagagacccccctcttgtgcccctcctgctgttggccttccccatgggtcaacataaggaaagtgagcacagatgggagggtctctggtcgggggagagccctgtctgaaagtcagttcagacttgatttgccattttttggctgtgtatccttggacagggccttgggcctctgtttcttgaactgttagagaggggattaggctagatggcctctgaggaccccgcctgctctgacattctgcggtcttccaagtgggaagattttaaggtctcccttccttcccgtgctgtctccccaaagtcaaccagcctcctagaccctgttaagtaagcccatggagccccttccggtggggaaacatgaaggtttggctagaacttgggcttttgtggcatcttagcaaagaagcaatatgtttttagagaagtgacaagagaaaaggaaaggaccttgagtctcaaggggtggcaaattttgggaaggcaaatacatgggaaactcatggtagataaaacttagaaagtttgttgtgtagattcctctggtgccctctccaggctcgtaaaggtctgaaggcatctctggtgatcagcctttgtccttcctggtagagaggggaggggggacacctttgtaaatttatgtcctgcttttaggcaaataaagggaaactagagagcttttcttatatctgcttcttctcaattgtcttcggctcaaagaattcttatgccaaagtggcatatttggaggtggcatatcctgccaccttacagaatggtgcccttcgtaaatatctggtgagttggggaatgagaactaattctccttcccctcctggtctgtttaggttctaggagcagccgttgtgaaccagccactctccatacaggtgatattttcaaaccccctctcggagcaggttgaggactgtgtgctgactgtggaaggaagtggcctcttcaagaaacagcagaaagtcttgtaagtgctgcaagtgctcagccttctcctgtttttcccccctgagattagcactatccttcctgaacatgggttcctgagccagactccacaacaccggggaagggaaagtggaagcactccctcccactcaggaagctgggtggaaaagggctccagggtcattatcatgcttttggttttctgacatgctccattctctgttgcagccttggagtcctcaaaccccaacaccaagcaagcatcattctggagaccgtccccttcaagagtggacaaaggcagatccaagctaatatgagaagcaacaagtttaaggacattaagggttacaggaatgtttatgtagactttgcattataaattctggaacaacgcgccagacgtgtgaatttcaagcttcaggaaaaggagcaagttcaaatgcaagctgcgccattccccaccacaacagaggcttcacagggctccagcaagagccacagaggggatgacgtgttcattttctgtctctcctgactccactagaaatttaagctccatgagggcaaagactttgctttgtttactacccctatactcagaaccatttctggcatatgctaggcactcaacaaatattttttgaatgaatgaataggagactccagcatccagagaacaggtaggaaatgtctatggatggatatttccctggaccatttgcacagctcccctggactcttttcagggcccagggattccactgtgtcccatccagagattccaggattccagtctcctatccagaagcgtgatttggcacagaggtcagaggatactggtaggacttggccatgacttaactgccccctgccccagatatccaggaaagaaaaagacaggctgaacagctcactgttgttttgttgttgcgaaagctaattccctagtatgaataaacttcagaccttgctctcctttgcctcatgtagtcatcactttcctatctgttccttggatgctgcagtctccattcattcaaaaaagtatttattgagtgcctagcatatgccagaagtggttctgagtgtaggggtacaaagtaaacaaagcaaagtccctgccctcatggagcttacatttctagtggaggcaggggacatagacaatgaacacgtccacaaataagtgagatactcacaggtggtgtatcagccatgatccagctagaaaaaacaaaaactcacaggtgtttctacttactacctaccatctttgtgtcttggggggaaaaaaaagtctgggagacctttcacccttggccttcctttgaatcctttcccatatgacatctaagaggtccctcagtcctaacagtaccagcctattcactcaaaactcactgacgcactgtggtcctggatggccttgggttggctggggagataaagctggctgaataacacaatgaggtagactttgagtgggaaatggaatactctcagagttttctattagttgcagcctgtgtttatggtcatgcaaactccacgctttctgggtcctactgaacacaaaaaaattctgatcattatctcctcttgtggcactgcacaaagttctgcacaaagaaaggcatgatgcacttgctctctcagtactgactatatgactgagacagctgtcctatcaaatacacacacagtaaataaagaagatgaagacttccaggccgggcgcggtggctcacgcctgtaatcccagcactttgggaggccgaggcgggcggatcacgaggtcaggagatcgagaccatcccagctaaaacggtgaaaccccgtctctactaaaaatacaaaaaattagccgggcgtagtggcgggcgcctgtagtcccagctacttgggaggctgaggcaggagaatggcgtgaacccgggaggcggagcttgcagtgagccgagatcccgccactgcactccagcctgggcgacagagcgagactccgtctcaaaaaaaaaaaaaaaaaaaagacttccagtatgtataaaccaaaggtatgtgtagttaatcagtgggatagaagggcatgtggcaagaattagggaaagtagggaaatagtcctgtgagagagtgggctgagaaccaggagctactggcagggagctggaagtaacttaaaattatttcatcttataattattacctgacaatcatgagaaatagtttaaggaaaacaccagagagagaaacatcttatagacacaatgacctctgaagcacatggaagatttcaggaactgcaccctaggactctttaatgagtcctgattttaacaccacattcattaattctttgattcaacaaaaatttactgagtttctactaggggccaggccctgagccaggtaggccctaaggacacaagaaggaccagggcctgcactcaaggagctcaagtctaaggatgtggagaatgaaaaataaacaggaggttataacacagagtggtgagatccaccactggggtaaaccagggtgttgtgggagcacaaggagggccagctagtccagccttgggatattggttcaaggaaggcttcctggaggaagtggtatttaagtggagccctaaaagctagtggttggtcaaagactaggaattggaaggagagggagtggaataaagcagccaggaactgcaagtcattcagatggccagaggtcagaatgggagggagcaagaagcaggaaagaaatgaggcaagagccagggggtgaagagcttcaggccgcagtctaaggaatttgggtcacaatcatcttcaggcatctgcctcctctaagtcttggatcacaatcacttcctgcagtgtcagtgctcagggccgattccactttgcagagctgagcagacttcatgtgacttaagaagcacttaaaggacaaatagttctccacccttgtctgccataggagcttgcaattcccatcagagtcacttctttgagcgcaaaggccttccttaaatgcaaaggttgtctttcatccgttcgtttaacattttttgagttcctaatgtgctgagtgttctaggtgtagggaatagaccaataaacacggcaaataaggttctccccaacccattcccaatggacaacctcacagcccctcatcccccaaccccagtggaactcagtataattttcttctgacaacgctcagctcagctccaggcaaaaagggtttttgaagaaatttctttttccttattgtgtgtagccttggtcgatctgccagtgaagaagccctgcccgcccatggccaagaggtgggcatgtgacttatgctgggacaatcagacacttctcccaggactttgactgcagagtgaagtgggttagaaaagggagaaacttggagtccatccatcttggcagcagagacccagagacagaccagcctctgttcctgctgcctagtcactcgagctgccctggagtccatccttctcctagtcctggctctccttttccccatcaatctacgagctccttcatactcttgtttttttaagttgaccaacactagttttggctttgcttgcattcaaaggacaatcatgagacaaaaggactttatctagttcagagaaattgggtaatttgtttaagaccacacagcaaagtctgtctgattccaaattccccccatgtcacactgcccagtactcccataggtctgcccttgggtcctaaaggtgtctttgttagtgtcataagttagcctgaagttcaaggaagtgtcagaagctctcattcaccccaacctggtgaataactggagagctgggagctggctgtgtggaaagggcaggcagcaacaagagctacactttgtttcccagagctcgctcctcctttagtccctggccctccaaggcccactgttcagtttttcttccccaccacttgcccactgaccagcagccaaccaaccaatgagcagctggtaccacttctctacctgtccctgagacctgacttcccagtatccaggagccacttggtgccagttttggggctgctgctttttcaggagtacagacaaaaagaatttgattgcagagtgctgatctcagatatacccagctttcctccaaccccagaggataggcttggcttcagactccatgagagcctggagcttcctgaggggaggcaggccacgtgcctggtatagcaagtgttagcagaaggtctgagctgggatgctgaatgaatctgtgggaatgtgagaaagaactctgtgaacatagataatgttaggctctggataatgctaatatcctccagagaatgttctttctggtaggaagttaggatagtgggagagtgccataatggagatttatttaaaaccaggcttcagcttttttttttttttgaagcagagtttcgctcttgctgcccaggctggaatgcaatggcacgatctccagctcactgcaacctctgcctcccgggttcaagccattctcctgcctcagcctcccaagtagctgggattacaggcatgtgccaccacacccggctaattttgttttttgttgttgttgttgttgttttttgtttgtttgttttccatagagacagggtttccccatgttggtcaggtttcccaacctcaggtgatctacccacctcagcctcccaaagtactgggattacaggtgtgagccaccgcgcccagccaacttcagccttttataaggattagtctatttcctacttaactcaactcctggggcatagcccttctgcagtcccaacagaaagcctggggtgtttattggggcccctcatccttaatgaccctcaaactcaaaccctgctagactgccagattctcaggctcttatctgccaactatgaatgggcaaatgccccagatagaagagtggcagccagtttcaagttcactctctgctcttctcccccaagatcttgatccctcaagtcctcactgccttgatgccttcaaagagatatttaaaatatttcattcaacttttctaattgttcccaacagagaggatggtaacaagctagtctgctgtatttagatacagaaattcttgaaagattttaaaagaaggttgaatagagagaccttctcagtggtggctaggattaaggctaatgtgaaatcacatatgtggggtatgagttggaagacctcagtttgagtctaggctttaccataagctgtgagatattgggaaaccttcccttctggagcttagaggtaagtttctcgtatgtggaacacatgtggataggtaggctatagtatgcacttttagcctcctccttggctctgtttgggttccatctttattctttcatcatttgcatcattgtaatgtgctcttctgcaataccatatttcactgttagtcttaaattctttctggaatgaggcagtatattaattgatcttacattcgctaaaataaatgttaactctctgaacgtattttctcatcagtaaaattggaatcatgatcccttaatgcagtttacaagattgaggttcagatcatacaagataatgtacgcgaaagtgctttgtaaagcaatgtgccagcataattaacttatttgcacctgggagtcatgttgagtatcttttcctctctgccctccaccctgatatcctgtccattagcacgtcatatccatttaacctcctacatctccgtcaaatctgtccatgtcttttttttttttttttttttttgagatggagtcttgctctgtggcccaggctggagtgcagtggcatgatcttggcttactgcaacctccaccttctaggttcaaacgattctcctgcctcggtatcccgagtagctgcgattacaggcgcccgccaccacgcccagctaatttttgtatttttagtagagacggggtttcgccatgttggccaggctggtctcaaactcctgacctcaggtgatccgcctgtcttggcctcccaaagtgctgggattacaggcgtgagccaccgtgaccggcctatgtctatctttactaacaccccccggagtagaccaccatcatctttcacgtgggccattaccctagtctcttattggtcatctctcttccctttttgccccctctaaatcatttcccccatattagccagtattttaaaaatacaaatctgattgtgttactcccttgcttcaaatatcatttcaatggcttctcactgctctgagaataaaatccaaaattcgcagctcaactctgcaagatttagcccttgccttacctctccccatctctctctgtgatgcagacccactgacctgctttcagatgcctcctgccttagcgcc

SEQ ID NO: 95903 - DNA, 13069 bp, Homo sapiens
cagcactttgggaggccgaggcgggcggatcacgaggtcaggagttcgagactagcctggccaacattgtgaaaccccgtctctactaaaaatacaaaaacaattagccaggtatcgtggcgggcacctgtaatcccagctactctggaggctgaggcaggagaattgcttgaaactggaaggcagaggttgccctgagccgtgatcgtaccacggcactccagcctgggcaaaaagagcgaaactccatctccaaaaaacaaaaacaaaaacaaaaaaaatccccaaccagctgagagacttgaatgtctcaaggaattaggatctcacagttctccgttactggcaacagccagacttaagtcattttggattagctgttatacagtgttaaaaactgtgcaactctagaattgaagtataattattttattaaattatttgctaataaccagccagttttttgtatcgtaaggacagttacaaccaaatatctctgagtagcaaaatataattttagggcctagtgttatacgtcaggcctaacctctactgtgcaaagatcataaattgaagctagataacaatatgaagccaaaaagctattcaagctaaccaccaaaaaagaatagtgctgcttcaagttataaacctcagtgaccatttaagtgaggtcccataatgccataatatacctgacctattttatgaatggtcaaggagtacatttctgctttattagctaagtagcctgtcaagttcttagtgaagggaaatatccctttttaagccctgtgctggtgagtcctcccggctccaggaacatctcaagagtgcatactaatttagacaataaagatgtggcagttactagattcaaacttacatgttgttttttcttttttccctaaaggaggggcaacccccttcatttatctcgtgagcggtatcggaagctccatttggtctggcaacaacactgcattatagaagagattgctaggagccargagactaatcagatgttatttggattcaactggcagttactgtgagctccaactctgcctcaagacaatcacaaatgacgacagtagtaaaggctgattcaaaattatggaaaactttctgagggctgggaaagtattggagggtcttttgctccatgtccaggttcacttacatcaataaaatatttcttaatggagtattgctttcaattagcaaacatatgcttcacaggaaaaaaggacatagatcaatctgttttatgtgctagtatttccaggaatttattccccttcataatttgtctcatttcattttatttcatccacttggtagatgaagtcacgtcaaacagttgtagacattttatrtgttggttaactcttctgcaattttgtatttggtgttttccccccaagtttagttcaactgacattggatcactgacaaaattctaataatctgtgatagtcttccttgcagttaaagaagaattgcagaaaccatgcaatatacttgggaaagattccaaaaataaattttttattatttctcttttaaggaaatacccctaatgtgccacctgctgctatcaccacaaattaaactcaatctctatgtggacagaggatgatttctgccaatatggaaaagcttttttctcactgtaggcctcaagaaaagttagggtaatgtatttgttattcattcctgacggtacaaagagcttgcagttctcacctctgactaccagtagctttgttgagttttgaaataatacttgacattttccaaaggcaaatctcattctgcaaggagattgtggcaccatcctgtttgactctcagaaacctcttgtaattctgatgtaaaaactgtagaatgaagatgagaaaattctcgcaatgagtggatcatgacaactgtaaattagaacaatcagatttaaaccaattccgcaatcttctatatctttgtaaaagacaaatccttgatgttgtctgtgtgcaaccttttcataaactctggttttatgactagtacaaaccaccaaaaaagccatgtgatcaatagtctgtgtcctgttataacatgctgtggttgagccatcttgtttataaataatagagctctcctgaatttgtgcatagacttcttggttcctggcttttgttttttgtatcaagagattgtgatataaaacagcagaagataaatggaaaccttccattttaacttacgttgtttctggggtaatgttagaaccttgaaagatgcattcaaagactgtatcttattttgcccttggctattagtgtctcacatatgtgtgtaaatgttttcctaccttctttttgctcagcaaaggcaagcaagtaaaatatatttgctaagtgattagtgatgcacatttggggctagatttttttggtacttttatgtaaagaaaagtggattttgcagtaagggattggcatgagcaggcgtcagaatcacaatcatgattttctacttgaataattacaattcagaaggtatctggataaatagatacatgtctagtgaacaatttgtaacaataacaggtaaggatcaggaaattcagtattcagtttgtcagatttgccagaatgatgaaagtatttgaacatgtgtgtttgtttcttatataattgtattgagtggattgtttgactgggaaatctgggctagaataggaaacagaagatactgacttctaccctaatagatgggccccaatttagcaaagataaactgactttatttttagtcctttttatattaacttaataaattctggagttaggctctcaagaggacagagggactgtctggcaatggccagccagacctttactgccaaagaacccatttcatattgcgttccactgattgagattgattcagatttttgcactgtagatgagcgtatgtctcagtgctgccccaagccccagggatttctcattatgttcaaatgtcctagtgatttaccttaatcattgcaaacaattatgcttatgaagtttacttacaaacaagcaactgagtcactttattttctttagtgtagtatgtgaaggcactggttcaacaggatggctccagaactgtgtttttctaatgtttggtaaggggctagtgagaattttaatgatatggtgaagaaaaatatatctgtataattaatttattatattggtgtatgggctgtgagttcaccttttagtggtcrtttgtcatttcataacaactatgcattttggttcactgtgatgatgatctatatttagtgactgcaacatgtttataccactgattcaaattccatccatgatgaagttatacaaataatgcatatattgataacttttattgcaaaaatgtaaatttaaaacttgtataatgttcttgtgctttttaaaataaaatatatgtgtatatttaaaaagaaaaatagggacttctcatgtttggggatttgggtttgaagtataaaaatctgctaggaagactctccagttgaaacctttgtcagccgaggcaaatgttttaaaagacataggtgtttagtatacatgggtctccaaactttttagccatatactccatcaataaatagtttttagcatgcataccaaatagaatataaacacataacacatattttatattctatatgcagtgctttactaatacatcatgcaaattataaaacatagctttaaaaggagatttaaaaatcagttaaaaatagaaatagatatttaaatatcttccaatccaatctgcatccttttgggtatgcacgctctaatatggagacagctgtctagagcagcagtatccagaagagttttgcaataataggaatgttctggccgggcgcagtggctcaagcctgtaatcgcatgactttgggaggccaaagtggggggatcacgaggtcaggagatcaagaccatcctggctaacacggtgaaaccccgtgtctactaaaaatacaaaaaattagccaggcttggtggcgggcatctgtagtcccagctactcaggtggctgaggcaggagaatggcgtgaacccaggaggcggagcttgcagtgagccgagatcacaccattgtactccagcctgggtgagagagtgagactctgtctcaaagaaaaaaaaaatgttctgtgtgtatttaccatatggaatggcagtcactattctcatgtggctgttgaacacttgtgatgtggctagtgcaactgagggcctgaatttttaatttttagttaatttaaatgtagtcatgtgtggctggtggctaccatattgggcagtatacatctagtgtgatggttctcaaacttaactgtgcattacagtcacctagagagtattaacaaaatacaaatgcccagttctcaccctcgatctggaatcaatcttgtgggattgagccttaaaataagcagggtggttttcttccatttctgagccatgactcttcataaaatgaagagtttgctttctttttagcttggtgattttcagactaagtgccaaagattctgggagaaacgtaggcccgagaggggaaagagtgccaaagctggatagttgtgatttttcattttgagtttctgtgtaagctttcatttgagaaaagggtacctggaatttttaaaaggttagatgcaattgctttagttttaagctttaaaatattctatgagggggccaggcacggtgactcatgcctataattccagcactttgggaggctgaggcgggcggatcacgaggtcaagagatcaagaccatcctggccaacatggtgaaaccctgtctgtaccaaaaatacaaaaattagctgggcatggtggtgcgcacctgtagtcccagctactcaggaggctgaggtgggagagtcacttgaatgtgggaggtggagattgcagtgagctgagattgtgccactgcactccagcctggcaacagagtgagactccatctcaaaaaaaaaaaaaaaaaaaaaaaaaaaaaaaaaaaaaattctgtgaggggcaacactgaaggcaaagaacggtttttgtctgttttttgttttgagtcggagtctcgctctgtcacccagatcagtcaagcgaaatttggggaaaaaatagaaatgaagactaagaaggaagacaaaaatgaaaagttaccaatggaatgcacagtaaggaaaagctggaaagacctgggcattgtggcgcacctgtagtcccagctacttgggaagcggaggtggcaagatcccttgagaaggaggtcaaggttgcagtgagctgacatcacaccactgccctccagcctgtgtgacagagtgacaccctgacaaaaaaaaaaaaaaaaaaaaaaaaagcagggggcagggaaggagaaaaaaaggatttaggataaagaagatttgatatatattcattggagtccctgaagaaagaaaaagcaatggaacagaacacaaatggaaaactataattaggttaaaatttcttgggggaaaaaaaaaacttgaacacattttgaaagagaacattgtaaaaacccagaagagtcaacaccaaaggattttcacatccagacaaactatccaagcataaagtccacacagatagttcagagcatgctaatactcagggaatattttttcccatgagcctttcctaagaaatttaccagtgagcaagcttcagacaatcgtaaatgattatagaagccttggcataaggtctgggggtgagtgttgcatatgtttaattgtacagatggagggatgagagacaaaattggatgctctaatgatgtagaattattacaactaacaaaaaataggagaaaaagggcaagtgggtggaaagttaaacaagctcactaattacatcagtggttttcgccagaattaaaaaggtatcaggcagaaacccgcatccaggaacaaagccctttgctcctccctcagaatgaatggagaccagagatcagatgtttatgtccaagaaaagcaggatttcgttcagtacttctcccagatcattggggatgagatgaggcacccatagacaggagatgctatcacccagctgaaggagatcctgtagtacaatgccattggaggcaagtatcaccggggtttgacagtgctagtagcgttctgggagctggtggagccaaggaaacatgatgctgagagtctccagcgggccctgactgtgggctggtgtgtggaactgctgcaagctttgttcctggtggcaaatgacatcacggattcattgctcaccgctggtaacagatctgctggtttcagaagccgggcgtggrtttggatgccatcagtgatgctatccttgtggaagcatgtatctactgcctgctgaagctctattgctgggagcagccctattgccagaacctgatccagctcttccggcagagtttctatcagactgagattgggcagaccctggacctcatcacagccccccagggcaatgcggatcttggcagattcactgaaaagaggtacaaatctactgtcaagtacaaggcagtttctacttctacattcctgtagctgcagccatgtacatggcaggcattgatggcgagaaggagcacgacaatgccaagaagatcctgctggagatgggagagggagagttcttccagatcaggatgattaccttcacctcttttggggaccccagtgtgaccagcaaagttggcactgacatccaggacaataaatgcagctggctgctggttcagtgtctgcaacgggccactccggaacactaccagatcctgaaggagaattacagacagaaggaggccaagaaggtggcccaggtgaaggcagtatatgaggagctggatctgccggccgtgttcttgcaataataggaagacagttacagccacattatgggtctcattgaacagtacgcagctcccctgtccccagccatctttctagggctgacatgcaaaatctacaaaagtaaaatgtgaccagagactgcaagggtggggagaggaggctctcaataaattattgtgtaaacttaaaaaaaaattaaaaataaataaaaaggtatcacttgaaggtgacaaatcaagaaataaaaacaagtggccgggcgcggtgggtcacgtctgtaatcccagcactttgggaggctgaggcgggtggatcacgaggtcaggagatcgagaccatcctggctaacatggtgaaaccccgtctctactaaaaatacaaaaaattagccaggcgtagtggcgggcgcctgtagtcccagctactggggaggctgaggcaggagaatggtgtgaacccgggaggcggagcttgcagtgagccgagatcgcaccactgcactccagcctgggcgacagagcgagactccgtctcaaaaacaaaacaaaacaaaaacaagtacacacattgacactaggataaagctagtggctaaatggtgagagagaaggagcagggtaagaagcaatttcaaaattggtcatgtattaagaaaccaacagtatttaaggaaagagaatattacataaagatgtaagtataaaatttactgctagaagtacaccaccaaggccgggcgcggtggctcacgcctgtaatcccagcactttgggaggccaaggcctgcggatcacgaggtcaggagatcgagaccatcctggctaatatgttgaaaccccgtctctactaaaaatacaaaaaattagctgcgcgtggtggctggcgcctgtagtcccggctactcgggaggctgaggcaggagaatggcgtgaacccaggaggcggagcttgcagtgagccgagatcgcaccactgcagtccagcctgggcgacagagcgagactccgtctcaaaaaaaaaaaaaaaaaaaaaaaagtagtacaacaccaaagaggaggaaaaaggcaaatagactacatagtgaaacaatgtggttcccaccctgtgccctgagctgcagccaggataggctctggacacctgagaccctgagctggaataagcagataaataattattttacttgtttttatcaatctttcttaaatgtatgtatagttcacatttatttcagtgtttaatattagaagtgttttcgtctttatttagaagtttgggccgggcgcggtggctcacgcctgtaatcccagcactttgggaggccgagatgggcggatgacctgaggtcaggagtttgagaccggcctgaccaacatggagaaactccatctctaccaaaaatacaaattagctgggcgtggtggcgcatgccttaatcccagctactcaagcggctgaggcaggagaatcgcttgaacccgggaggctgaggttgcagtgagccgagattacgccactgcactccagcctcggcaacaagagtgaaactctgtctcaaaaaaaaaaaagaagtttggtgatgtttttgtgatgagaagtgtgccatacgaacttaactcttgtttatagtaattagcctatggtaaaactggctttgttatacatcattttgcttaaagtcacagttcccaagggttaatgatgttaaatgaagactcatgtactgcttcacacctaccagaatggctataatcaaaaagatgggcaataatgtgttggcaaggatgtggagaaagtggaacccttatacatcactggtgaggatataaaatggtacagctgctttaaaaaacagatgggcagttcctgataagatctgttaccagatgacttagcaattcttctcccaaattaaaatttcaagagaatttgaaacatcttcacacacacacacacaaaaaaaaacttatacaaaaatgtgcatagcagcattattcataatagcccaaaactggaaactacccaattgtccatcaaccaatgaatggataaataatatacctatccatacaatggaatattatgcacccataaaaaggaatgacattctgatgcatgccatagcatgggtaaatcttgtaaacattatgctcagtgaaagaagccagtcacaaaagaccatatattgtatgattccatttatatccaatgtccagaattagacaaatccatagagacaaacagtagattagtggttgtcaggggttgggaagacaggggagtaggggatgactgctaatgggtatggggtttcttactgggttgatgaaaatattatggattagatagtgtttctgattcaatgcatcctggagcatggcacccaccttcaaagctgacacttccactgtaccttcagcaggccattccaacattgtattggctcagctgctcctgagtggtgcagtatgcagtacaaccagggtagcccatagtcatggggcccactgcagcactttcttactgtgaaatgggttccctggttacatgctatgctgagtggaattccatgttgtagaacaggtactcgacaagcccccagacactggtgctgcctgaagctctgtgggcaggaaaggcaaacccatatgctgaatatgtatctgttcatatgagaatgaaccagtgactcttctaggatagaaacatcctggccaggcacagtggctcatgtctaatccaagcactttgggaggccaagacaggaggattgcttgagctcaggagtttgagaccaccctgggcaacatagtgagaccttgtctttactaaaaataaaaaaataattagccaagtatggtggtacacacctgtagtcccagctattcaggaggctgaggcaggaggattgcttgagcctgggagattgaggctgcaatgagctatgattgtgccactgcaccccagcctgggtggcagaaggagactgtctcaaaaaaaaaaaaaaaaatgtagtcaagttgctgcaaggtagctggttgattttgaaaaacagtgccacaggctgggcgaggtggctcacaccggtaatcccagcactttgggaggccaaggtggccagatcacctgaggtcaggagtttgagaccagcctgaccaacatggcgaaaccccgtctctactaaaaatacaaaaattagccaggcatggtggcacgtgcctgtaatcctagctactcgggaggctgaggcaggaaaatcacttgaacccaggaagcagaggttgcagtaagccgaaatcgtgccactgcactccagactgggcgaaagagtgagactctgtctcaaaaaaaagaaaaacaaacaaaaatagtgccacatccgtagagcattggtctctgtggctgacaggttggatgttcaaaggtggcagtcttgatgagtggaggtccatgccactaggcccatgcttaacccccatctgtccatttgtgtacccattgtgccagcttccaaagggtgctaaaacattagtttgagcattattttgacacttgattgttttggtccctcttctgtaatggatgctttctggtggctgttaacatgtaacacagaaatcttcagtgtgcactatgtgcactcacttagcccatccacggtaacatacagtatctatttgtgttcaagtttttcacctttgagattcatccatgttgtatgttccagtaggtctttcttcttattgctagttagtatctagttgtgtgagtacataatttacccactctcctattgataggcatctgggttgtttctaaatttgccattcggaataaagctgttatgagctttttttttttttttttaagacagggtctcactttgttgcccaggctgaagtacagtgacgttatctcaacgtcctgcagcctcaacctcctgggctcaagggatcctcccacctcagacccccaattagctggaactgcaggcgtgtgccaccatgcccagctaattttttgtatttttttgtacagtcagggttttaccagttgcccaggctggtctcgaactcctgagctcaagcgattcacccgcctcggcctccctaagagccaccacgcctggccaaagtatggactacagtgagttccttctaaagaatacaatatgaaacggagaaaaaaaaaaaaaaaaaaaactttacagtgaagaaacctaacaaacattacctcaaccaggtgagcaaggtaaatatcagtagtgatagaatcacgctgatggtatgtaaccttgatatgatatgatgaaatggtactttatgtggttttcctccctaaaacccttaactccagtctaataataagaaaaacatcacattccaatagagagacaagctacaacatacttaacaatattcctcaaagctgtccaagtcatagccaagtcatagatgtgaggtggtaccctggatgagatcccagaacagaaaaaggacactaggtaaaaactaaggatatttggacaaactatggactttagttaataataattacccattttattatttttattttatttatttatttttgagaccaggatctcactctgtcgcccaggctggagtgcagtggcacaatcttagctcactgcaacctccacctcctgggttcaagtgattctcctgcctcagcctcctaagaagctgggactacaggcacgcaccaccatgcccagctaagttttgtattttttagtagagacggcgtttcactatgttgcccaggctggtctcgaactcctgacctcaagtgatctgcccacctcagcctcccaaagtgctaggattacatgcgtgagccaccgtgcccggccttattattattatttttttagagacagggttttgctaggtcacccaggctggagtacagtggtgagatcatagctcactgtaaccttgaactctgggctcaagggatcctcccccctcagcctcccaagtagttgggaatacaggtgcacaccatcatgcctgactagttttgaaattttttgtagagatggcgtctcactatgtttcccaggctggtcttgaactcctgggctcaagtgaccctcctgcctcacaatatactcttttcataccttttgaatgttttaatgccttttgtttgaatgttttaataccatttgaactttgcatgcagcaagaaatcaagattcttctgagaaggggatcctttctacaccagggtgagaaaacagtccttatcaccagagacggagctggaggcaatacacatgtaaaactaataaaatttgtatacttttctctggttaaccacaggtcaatgtggtttttagatccagctgaagagcacactaagagctaaaagagaggttggaggttatctctggctcccataccatgtataagaaaccagtaataaaagtcagggaacatccatgggagatgtggatggaaaggaggcttactcttcactatatatataaatataaatatatatatatatttttttttcgagacagggtctcactctgtcgcccaggctggagtgcagtgacatgatcacagctcactgcagccttgacctcttaggctcaagcaatcctcccacctcagcctcccaagtatctaggactatgtctagttaattttattttaattttaatttttgtagagacaaggcctcactatgttgcccaggctggtctcgaactcctgggcacaagcagtcctcctgcctcacaatatactctttttaataccttttgacctttagaatgttgcactatatgaatatattttctattaaacaaacaaataaataaaatcagaaaaaaaagaaaatggtctaccaaatcctcctcctgacatttgtagttggagtggactagaatttttcctgtcaggaaagaataggcaaggggtagctgagaataacccaaaatgttctgagatccttccaggaggagcctctgggtaaaagtaaacacagtgaagtaagaggcaaggaaagaggatctgggagctcagcaggaacacttttcacacaggtcagactgtcctacccaatggcctctcctcaatcctgtcct

SEQ ID NO: 95904 - DNA, 31078 bp, Homo sapiens
atataactcagatatagtcctcaaaccagtcaaagtataagagatttttcttggctggtttaatatagttacaatttagggagagattggagggatggtgtttaattaggacattttcgcaatgatccaataaaagtaacaaaaattcctattgatggtagaaatagaaaagagtagatgaatgtttagataagctggcagcacacagtttccaaaggtatggtatagtcagtcttaagatacagtatttgggctgggcacagtggctcacacctgtaatcccaatactttgggaagctgaggtgggcgggtcatgaggtcaggagatcgagaccatcctggccaacatggagaaaccccgttcctactaaaaatacaaaaattagccgggcgtggcagcattgtgcctgtaatcccagctactcgggaggctgaggcaggagaatcacttgaacccaggaggcagaggttgtagtgagctgagatcacgccactgcactccagcctgggcaacagggtgagactccgtctcaaaaaaaaaaaaaaaaaaaaaaagccataagtatggtaaagataatactgaccttctgttaatttcttaaacacaaaaagcatattccaatctcagggcattggcacaggcttttccctcttccctttcctcttccaattcttctgcttggtttctacttatccttcacgtctcagctggaatgtcacttcctcagagaccttctctcctttcctgttgtgaagtaagaaatatatatatggtctctgcctctagtctctggcctagagctcccaacacccttgtaatttcctgagttacaggggtgctaggagaatctttggttctaatgtttggtcttcactctcgttcctgacatggagctcttaaatccygtggactttcctgagtgataggagcagtcttttgttctaccaaggcaattcttgcccggctcctagatgagggctggtcaccggaaagcccaaccatgatcataaacttggagctttcagcccctacctccattctccagagagggacggaggctggaaattgagttaataattgatcatgcctacgtgatgaaggccccataaaaatcccttaactatggggttcagagagcttccaggttggcaaacacacatccatgtgcctggaatgtggtacataccaactccatggggacagaagctcctgtactcaggacccttccagatctcaccctttgtatcccctggctgttcatctgtatccttattacatcctttattaataagccagtaaatgtaagtaatgtgttttcctgagttccatgagccatcctagtaaattaatagaacctaagaagggggtcatgggaagcccaatttacagaccgtccctggtcagaagcacaagtcacaatctggaacttgtgattggcatctgaaggtggggggcagtcttgagggactgggccctgaacctgtggagtctgatgctatctccaggtagatagtctcagcattgaattgaattagaggacacccaggtggtatctgtgggagaatttgcttgatatgtggggaactccccaaccaacacctggtgtcagaagtgctgtgttgagtggctgagtggtgtatgagagtaggaaaaacaatttgttttgtttttcctatccttaatacctgtttaaagtagcccttttccgtttatttctttcaaagcaattttcatcacctttaattatcagatttattcacttgtttacttcttcaatgtttgacttcccagtagactataagcttcatgaaggcaaggattacagtgtttttattgttgttgtttgccaccaaatactcagcctctggtatagtaactagcaagaagtagatgttcaataaatatttgttttaataaatatataattattatgtttgttgaaaagtgtgaaccaacatcatagggaaaaattaccttaacattaacttctaaaaaatgatgaatcaagcaatttcctgaaaatgtgcaagaacagactttcagaatgatgttctatgaactgtagtctgcaggtcatttgaaatccagcaaatattttcatcctccttcttctgattctataacttattctatatctagaattactctaaagactaattctaacctggatacaagataaaaagtaaagatggaagattctaaagaacaattttaacaatgtcccatttagggggattttcattacatactttatgaacacaggttcggcatattagctatccgtggaaataagtcacttactacatctacatgagcatgttgagatgaaagtgtttgcaaatcatgctttttcaagggtggctaaacaaatctctattcatctattacaactcatagtcattgctaatgttcaaatatattagggttgaacataacacaaaaatggaaatgccggaaagattaacattatttaatctacagatgactcatgctactggtttaaccattttctttagatttttttcatatacaggaatatatttttatatacatatataatatgctgaagggacaaaaatattgcatgatcattatcctaaagaaacagattccaattatttcttttgaattatagacttacagttaattaagaatttttatagttaattaaaaattagacagattgtaaccttgaatgtaacaaaggacataaagagaaaccatttgtcacatgtaccttttcgggaaaatctcacaaaagattttgtttggcaaagctatttgaaacaatttaaagctagaaatgtttctaggctatagcaagatgaattccatcggtttggattttgacctaccactaaattttggatttaggaacagtctcatttttatacttaacacaaaaattaaattttaacttagaaactgagttttacacagcttgaggcttgtgaaaaattatgtgaaaataagtcagttactgctagggtctcagtgtttgtgtcctccacaaaattcatttgttgaaattttaacccttgagatgatggtagtaggagtcagggccttttgggaggtgattaggtcacgagagtggagccctcatgaatgggattagtgtgcttataaaagaaacatgagggagctagctagtcccttccaccatgtgcaggtacaatgagctgtctctagacagggggcccttaccagtcatggaatctgccagtgccttgtctttgacttcccagcctccagaactgtaaaaaataaattgctgtcatttataagctacctcgttcgtagtattttgttacagcagcctgaacagactaagccagataatatatagagacaacagatggcttcatacacctaggtgtgaatcctgggaaaattgagtggaaaccacagttgagaacaccaacgtcctaacaatcctgtagccttcaggcttagttggttctggactccctctagtggttcaattctagtgctttaattgatgttcttcaattcatagaattaacaaatttctggtcagattaaaaacaactaagcaaaagagccacacaactcccattagaatggtttaccacaaggaggccaggtgcagtggctcatgcctgtaatctcagcactttgggaggctgaggcaggtggatcacttgaggcctggagttcgagaccagcctggccaacagggtaaaaccctatctctactaaaaatccaaaagttagccaggcgtggtggtaggcacctgtaatcccagctacttgggagcctgaggcaggagaattgcttgaacttgggaaacagatgttgcagtgagctgagatcctgccattgcactcaagactgggtgacagagcaagactgtctaaaaaataaataaaattttaaaaataaaaagaatggtttatcacaaggagattatgtcattgaatggcatgataaatatggatgttcagatggctgaaatcatagtgttgcaaatggttagacctaaagggacagaatggattttactggatgattgggaaagacatttatagttttgctcagagtgagtggataagagctgaaggcccagtaacagaattccttgttgcttttgtttgcaacctatggtaaagactggatcttttagagaaagagtgaagtgaaataatatttcctgtgcatatggattctataaggtcagagggttcttgtttgaccttgtataaaatcaacctcttagaccaaccaaaagcaacatgtagtttccttctcatcatattcctaatagcatagtttgtgcctctgttttaaaccaattcagaaaattttgaggccgatttaactttattggctccctgttttggctttggttattccactccattaaacctttacttcttggccatttctgcactgtaaatataagtaaatctactaactcttttacatgagatccctttacatatttaagacagttatcctgtcctcaataagtcttctttccctctcccagatccttaaagcttcttggagctgaatagaaggaactcgatgaggtacaggcttctgataaaataacttgataggcatgtaattcacacctttaggggtcggtaaaaacgatggcttttttttttatttcaaaaaatgcaaagctgttatttaaaagtccccaaaccaaaaagaactgaagccaatgggattaagaggaaaaaagaaaacaggaagtaatgggtgacttatccatttcaagacctcctcctgctattttctgattcctaaattgttccagaatcgatttaagcagacaagtacagctgagaccaggtaagttactgtcaagtcaagaagtctgtcatgtctgccatgaagtttggacagaatgagatcaggaactggcatgggtcttaagatcccagatctgacagtacttcccattgataagatattactacacagtctgtaattgattatttgcatagatagaaaaaaaaaacttcccagcaacttaagcactctaaaatatcagttttgtcaactcacaaatttgggttgcagtgaaagtggggaaaatagaggtaggaagatgtaagtcaaataaaaacaaggtatatcttcttgtctttgagtatctgtagttcttttttaacggcaattaagagggatagaaaatgtattccagctgataaaaaggaattccctgtgcgaaagggaaaggcagaaagcagctggaaaaaaaaatagcaggcagttgtcttaataacgtagataggtatcgcctctaatacaggacttagtactgttgtgccccaattagacagtaagcattgatcgcatgaactttagtgattaacttgttgccaaagaatattcaaaagaatatcagaaatcagaacaaatgtactgttggtgtgctacaaatccatcaggtagcctagttttccttctttcctctctacaagggattttaagcgctaccgtgtgcttccctcccactatgctggtactttcccataggaagggttgtgcctggacctcccagattggaaccccgattaccgaaggtcccaaggctgtattctcagttacgccaagtcacctgagacatttgcaccagagcacccaaaattctgtgcccatgcggatagttagagtttcttcacaaaatagcaaagtctctaggttgctattccaacggcggtagtactgatgctccagttcgaaggccaggaaaacagaatgtaaagccggtgacttccaagatatatgtaaccaccaaagtacatgcttaatgacctagtgaagtgagcttaagccgcctcccagacacctgtaacgaagaccatctcgggaaagctctgggttaggcaactcgatttcacgaaagcggacaccaacgctctacccagaggcccgagcgtcgtctaacgtttccattggccctttcggccttcactcagctgctagcaacgcagtcttccctagcgcatgcgcgcaatctgcttccggcctgcgagctcggtgttccgctttttgtgggcygggtgggtttcctaatctggtttygtctgcytggttcatctgtgtgcgatggctccggactcggatcccttccctgaagggccgctcttaaagctgctacccttagacgctagagaccggggcacccagcgctgccgcctgggcccggccgccctccacgccctgggcgcgcgcttgggctcggcagtkaagatctcgctacccgacggcggctcctgcctctgcactgcctggcctcggcgggacggagcggacggctttgtgcagctggacccgctgtgcgcgagccccggggcggcggtcggggcgtcgagatcccggaggagtctcagcctgaatcgcctcctcctagtgccctgtccgcccctgcggcgcgtcgccgtgtggccggtgttgcgagagcsggcaggcgcgcccggtgcccggaatacagccgcggtgctggaggcggcacaggagctgctgagaaaccgaccgatctccctgggccacgtggtggtcgctccgccaggcgctcctggcctggtggctgccttgcacatcgtcggcgggacgcccagtcccgatcccgctgggctggtcacccctcgtacccgcgtcagccttggcggggagcctccgtcggaagcccagccgcagcccgaggtgcccctgggaggtctttcggaggcggccgactcgctgcgggagctcctccgcctcccgctccgctacccgcgcgccctgaccgcgctgggcttagcggtgcctcgcggggtgctmctggcggggccccccggagtgggcaagacccagctggtgcrggccgtggcgcgcgaggcgggcgcggagctgctggcagtcagcgccccggcgctgcagggttcccggcctggggagaccgaggagaacgtgcggcgggtcttccagcgcgcccgggaactggccagccgcggacccagcctcctcttcctggacgagatggacgccttgtgtccccagcggggcagtcgagcacccgagagccgcgtagtggcccaggtgttgacgctgytggacggcgccagtggggaccgcgaggtcgtggttgtgggagccactaaccggccggacgctctagacccagcgctgcgtagrcccgggagatttgaccgagaggtgaatgggcttggcgggtttgcccactgtcggtggaacctcggccscttctggcgccatttggctgccccggaggcgtttgcctcttaggtttgagcatcggtgaggttggagttggggctctttgcaatgcagagaacacgttctctgccgatatrtgatctgtgagtcaggacctgtatttccccagagtcaaattgtcaggacctgtgagtcaggatctgagagtcaggacctgtttccccagagtctaattgttttgggaagcgaggtgtccattacagattaattttgttgtgcaggtcctataatcagtaatgttaattcttaagagaattttggtcacctacaagcgtgttaaactcattttttggaatgagaatttaaagaaggatagcctcaagaagtaagtgtgttgaaataaaaagggagaaggtggggaagaactaaatggaagcaggcattaactcttctggatttattcattccttgtcataacaccagcatcctattccacaattgaggaggtacccacaactgctccctgagttgtcagggaggttgaatattcagagctgtcctattttaagctttggtcctaaattgacttgaattctaaagaacagtttgaaatttagtgactgatatttctattttgtgataggattcaaaagagaaatgataattacacacttttagctcagttagttcaggacttgagtggatttcttccttgcactatctagtacctgtgtccttaagggcagggacctagctatctatacctggcttctagaactttgtgtgttcttaaaaataacaaaaacttgttaaatgacatagaattttcattgtgcaactttctagccagtgttactcctctggaatattaggattttcgtatattcagaatctaaagtatacgtaaagtgcacggtactagttccaaagtggttcactaaattgtcgtacatgtttgtcaggataaaaaacatattattattttggccgggcgcggtggctcacgcctgcaatctcaatactttgggaggctgaggtgggtggatcacctgaggtcaggagttcgagaccagcctggccaagatggtgaaaccccgtctctgctaaaaatacaaaaaataagccgggcatggtggcacatgcctgtagttcyagctactctggaggctgaggcaccagaatcacttgaaccaggaggtggaggttgcagtgagctgagatggtgcccgctgcactccagactgggcagcagagtgaaactgtgtctcaaaaaaaaaaaaaagaaaaaaaaaatatatatatgtatacacacacatatataaaatttttttggaagtaattcttttttaattgatctatttttattgatacataattgtgcatgttttggggtacatgtgatattttggtacatgcatacaatttgtaattatcaaatcagggtgcttaggatatccatcacctcaaacatttatcatttcttatctgagtgttgggaatatttcagattctctctagtagctattttgaaatatacgagaaattattgttaactatagtcaccctactacactatcaaacattacacatattccttctacctaactgtatgtttgtacccatgagccaacctgtcttcatcccctcacccccaacccttcccagtgtctggttgctatcattctgctgtctacctccatccatgagatcaactttaaaaataatatattttaaactatatacttcttcttcttttttttgttttgctttgcatataggtggtcattgggactcccacacttaaacaaagaaaggaaattctgcaagtgattacctcgaagatgcccatctccagtcatgttgatttgggccttcttgcagaaatgacagttggctatgttggtgccgacctgacagcactctgtagggaggctgccatgcatgccctccttcatagtgagaaggtaagaagtgttaatttatgaacatctatgttaatctattattgtaacagattaatttgggggttaaaaaaaagcggtgagtacattttccttagaacatttgatagcttccacagctgttgcttatacattttacatctcaactctatataaatagtatatgattgagggtggggataaagggctgagtcctctgggtctactgagtgaatttgttccctactcttatagtaactccctagtgctgaagcccagagcagccaagaaatagtgtggccccagaagaatcaaagagtttttttaatttgaatttttttattttgaggcaatttcagacttagaagttacaaaaatagtacaaagagtttccatatacccttctcctagattctccaaatgtaacatttgccacatttgctttatcattctctcttcatgtgtatttccttatatatatacatatatataatgaaatatttgagcatatactacatccatgatgcccctttacccgcgaaaacgtaagtgtatatttctgaaaaacaaggaccttaaccacagtatgatgatcaagctgagaaaattaacgcagacataatacttgtacttaacctaaataggccttaatctagaatcatacttcaggctttcttctatgaaaacataactttttaagagtcagttattctgtrgaatattcgtcagtttgggtttractaatgtttcttcatgattcaattcaggttttgcattttgggcaggaatataatagaaatgatcctgtgtctttctcattgcatctgttaggcagcacatgatatgtttctgttctatcactggtgaagttaactttgatttcttggttaaggtggtgtctgtgagatttctccattgtcaagataccgtttttccctttgttattaataagtatctagtgggagaaataagcttttctaacctaggagaagattgggcacttggaattgtatttaaatttgtccttgatctgcaggtctgtaattcatgactatttcctaacaatatttaagatattagattaaatataatacttttcaactttgttggttgkaaaatccagtattttgtatataataaatagtcctgaatccttaaacccattcaggaaaaaactgatttcagcaggctaaggattctgaaacagagttttcaatctcatttgtaacatcaaaattgtcttttcatcttaaactgcaaaagaatgatttattatcctaaattttgaaaaacctttttacctaaataatttataccttgcctcacttcctttcctttatttctacagttacaccgaaggtggggaggagttatgtgatcttctagttgatcttttaagtcttcatcttgtaggtttagaccaaaactacttgaagttttaaagttctgtgtgtaaagatgtgagaatagatgtcttttgagggagacaataagtaagcaggagatgggaagggagatttacattcaggatttcctctgctttgaagttccaggtttgaccataagcacctctcacttaggtggaccagtcagctgctgtcgtcccagggtggagcccactgctacttcaggaggggcctgctcaggtgtagttaccacaggtgatggctgagttcagaaacaacccaggggaagtggaaggaagaaaggcaaaaagcatgaagggacagacaactgggaaggtactggctccatcttttattctttcccccrccagctgaggggctgctgctacctctccctgtaccagggcagataagggataccttacactttgttaaactttttgtgaagtattcctattaaaggattagaactgtagtttaacactcagacacacacagaggggaaagaatgtataagcccaaagaatcaagtaaaataatgtgtacacacatgatcttgaactataaatgagattttcaaatattagttcgtgttacctaaagattagttaatatttggacatcagacacctaacatactatcagccagttaaaaaggcttttttttaagtatataatagggttattcatgagaaatgaagatagaaaattataaagaactgcctacctgaaatctcactttccagagatgacaattgttaacacttttgggagaatactttacagaatagctctatacatacagattcacttaacatctgtttacaaataagaaaagacagtttgtttttgaaaacgggaatttgtggacaactagatgtttagaattggatataagagggcaaatactttaataaatacagtacagatatttttaataaaattttcaggactttttaactaacaraaaaaaatgtgtttcactagaatgatcaaggagaatgtaaagagtctccaaaatataacctgagagtgaagacgacttctctaggcataacataaaccttaatagccaaaaaagagattatttgctgagttgaccatttgggggtggcaaaacaatactataaagtagtcagactaggaaaaatacttttagtccaatttccttgatagggaatgaacaaatcttacaaatcagtaagaaaagaccaacagtccaagagaaaatgggtaatggggtatgaacaggtagttgacaataaaaggaatgacaataaacatgaaagatgttcaaccttgatttcttctaaaattattgtctttattttgaaataattaaaacttataggaaagttgcaagatagttacaaagaacttccactaaaccctttatccaaattcaccaatttttaactttttgccaaataagctttatcattctcttttgctctccttgctccctctcctcttctctttctctctctctctgtcatctccatatatatgtatttatatgcacatagtatttatttattttggactatttgagagaatgggttgcatatatcatgacactttatcccttaacattttaatgtctatttcctaagaacagaaatgttcccatatgtcaccacagtatggtgatgtatagtgttgtgtccttagagcctcacatgtagaggcacagagtgtacattggttcctcattggtgatgctaacttttatcaactagttcaggcagtgcgcagtttctccactgtggaactgctatttttccctttgccactaatgagaaatctgtggggagacactttgagatatcctgctcctcatcaaactttcaggctgggcacagtggcttacacctgtagtcccagctgctcaggaggctgagatagaatgatcacttgagcccaggtgttcgaggctcaatgagctgttgcctcaatgccactgcactccagcctgggcagcagagcaagaccctgtctcataaatgaataaacttttactcccctcaacatagcatccaattcttgctcataacagcctttactatcatgattgcaagacgggcgatttttttaattccaatattccctctacctcattttgaattgaagaaatttagttaacacagtaatgaatgagtactggttcttcctgtcatattggcagacatttaagagtttggaaatgggccaygtgcggtggctcacacctataatcccagcactttgggaggctgagatgggtgggtcagttgaggtcaggagttcaagaccagcctggccaacatggggaaaccccgtctctgctaaaaatacaaaaattagtcaggtgtggtggctcatgcctataaatcccagctactcggtaggctgaggcacgagaatcatttgaacccaggaggcggaggctgcagggagccaagatcacagcactgcactccaacctgggtgacagagtgagaccccgccaaaaaaaaaaaaaaaagagtttgrtaatgtctgtactggagaggtgtggagagaacacagcttcatattatcggagaagaataaattgttgcagcttccttagaggacaatttggtaatagctgtcaaaattgtatatgtgtgtacttgtaaacccagtaattctactttgaggaaattattacataaaatacttgaacatgagtttgaacatggtggctcatgcctgtaatcccagcactttgggaggctgaggtgggaggatcgctcgagcccatgagttccagaccagcctgggcaacatagggagaccgcatctctacaaaaaaaawatatatatatttttttaattagccaggctggtggcacatacctgtagttctagctactccggagggtgaggtgcaaggattacttgagcctgggagactgcagtgagctatgataacatcactgcattccagcctgggtaacagagtgagaccctgtctcaaaataaacaaatacttgaacatgagcacaaagactttttcagttgcagctttgtttttaatatctaaagactggggatgacctaacgtttgtcagaaaggtgtagttggggtaaattcagtagtgtattatggaattgtcaaaaagaatgacgtagaactgtgttagttgacatgaaaagctctctaagataggtgaaagaagaaaagtacaggctgatatagtatggttccatttgtgtatctgtttaaaaggatatatgtatgcttactagcataacatactggaaaaatacacaaactcttgacatctttcggggaagaattactggcaggaattggcagggagacatttaattctttgtactatgtatataaattgtttttataatgataacaaaataactttacaaatccaaaagaagattttaaaaacaaattgtgctataaaaaaagaccaacctaatttttggtttgattttgcttttttgggtgtatttcttcagaaccaggacaatcctgtgattgatgaaatagacttccttgaagcttttaaaaatattcagccctcatcgtttcgaagcgtcattggattaatggatatcaagcctgttgactgggaggagatkggtggccttgaagatgtaaaactgaagttaaaacaggtaagacagataatctacttaatccagtaggatattacagattaacattctgtgcatttatgatgacaacrtactgcgctgaaactgctcttgctcctatcactaatgtgatcctaacatctaaatccaatgattgcttttcagtccttatttaattggacttctgtggatgtctaaactggtttttataatttcccacctcgaccctctctttgtttttgctttaaagagtttataacctaaggctgggtgtggtggcttatgtctataatcccagcactttgggaggccaagggaggaggattgcttgagttcaggagttcaaaaccagcctgggcaacatagcaagcccttgtcgctatttaaaaaaaaataagtttataatctaaggctgggcgcagtggctcatacctataatctcagcattttaggaggttgaggtgggtggatcacctgaggtcaggagttcaagaccagcctggccaacatggtgaaaccccgtctctactaaaaatacaaaaattagctgggcatgctggcaggtgcccataatcccagctactcggaaggctgaggcaggagaatcacttgaacccgggaggcagaggttgcagtgagccaagatcccaccactgcacgacagcctgggcaacagagaaaccrtgtccggggggaaaaaagtgtataacctatagtcttagcactttagaaggccgagacaggaggatctcttgaggccaagagttcaagaccagactgggcaacaaagtaagactccccatctctatttaaaaaaattattttgacacatgtttgctctgtcacccaggctggagtattgtgtcacaaacacagctcactgcacccttgaactcctgggctcaagcagtccttctgcctcagtgccccaccaagtagctgggactacaggtgcataccaccacgcctggctaatttttaaattttttgtagagatagagtcccactgtgctactcaagctggccttgaactcctgggcttaaacagtcctccaactcggcctcctaaaatggtgggattatagtcatgagccaccatgcctggcctacaaaaaawttttttaaattagccaggtgtggtagcacgtgcttatggtcctagctactcaggaggatcacttgaggcttgaccccaggacacccaggagatcgaggctgcagtgagctatgattgcaccactgcactgcagcttgggcaacagagcragatcctgtgtctttaaaaaaaaattaaaaaacaattttgactgggcatggtggcttacacctgtaatcccagcactttgggaggccgaggcaggcagatcacctgaggtcaggaattagaaaccaacctggctggcatggagaaaccccatttctactaaaaatgcaaaaaattagccaggcgtggtggcgcatgcctgtaatcccagctactcaggaggctgaggcaggagaatcgcttgaacccgggaggtggaggttgcagtgagccaagaccacgccattgtactccagcttgagcaacaaaagtgaaactccatctcaaaaaaacaaaaacaatttataggccgggcgtggtggctcacaccagtaatcccagcactttgggaggccgaggcaggaggatcacgaggtcaggagttcaagaccagcctggccaacatggtgaaaccctgtctctactaaaaatacaaaaatcagccaggtgtggtggcgcaagcctgtaatcccaactactgggaaggctgaggcaggagaatcgcttcaacctaagaggctgaggttgcagtgagctgaggttgcaccactgcactctagcctgggacagagtgagactccgtctcaaaaaaaaaaaaaattataatctaaaacgggggtcaacagatttctgtagagagagccacatagtcaatgttttaagctttgtgatccacagtctctgtcataaccactcacctctgccgttgtagcaccaaagcagctgtagaccatatgtaaattagtaattgtattctgataaaagtatagacactgaaattatataattttcacatgtcagaaaatattcttttgattttttttcaagcatttacaaatgtaaaaactattcttagtttgggctgtaccaaataaaggtggaaggccttagtttgcctggatctctgatctaaaagacgttaaatggatgcagtacagggactggtaaaagcacaaaattgaaatgaacaatatggctacctgatagtggatttcacagtggaasctgtgggacgcaactcttcagatcctctcacctgcgttacagtttcagaaattgattttgccaattcgcctacatgtgatcctgccctaatgaactaggtttctctaaccacacacataacagactgatatataagtaataattataatttattcatcttaaccaggagatctatctccagtgaaccctagaatttttgagtccatggataagagcatttataatatgcgccaatattttttatgcattgtctcatttaatgttcacaagatgcatgagagaaattaaccacaccttcctgttggaagcactctgtttccttagctttgagacattaagcttttctgcctttctggccaccctctcccctcccttaaatgttagtgctcaagaggctcccagagtcctcctcttgttggagctgtgggtgattttatgatgatcttgatgtccacagcatccctgaaaactgttgactcagaaatctgtatatctagagtagacatttcttctgatcatcagaactacttcactgcctgcctactggataaccccrgggatgtcaaactcagcatgtaaaaagttcagctagtcagctctgcccccacacttggattccctacctcagttaatacagccagccaccccatcccctaagtcagaaatctgtcttctaaaggcatagcatcagaactttgtccctatgtaaagtacaattctgttttatgtttcaaatatccatcccttccacaccatcttcactgcttgtgacactccagccttattatttttgtaggctgaatcattgcaagaaacttgtagctggtctccctgcctctagtttaatttccttccagtccattctccatactgcttcctcagtgcagactaaagctttcaaggcctattgtgatctgactcctacctccacttcaacaccgttgctccttgctggtgctcttgaattacattgtctggggtcagtattggttctgccacctcattagcagtaagacctaggcaaattacttaactttttttaggcccgagtttttttgcatctgtaaaataatgattaaagtggttaaaaaccatttaccttaaaggtaatgaggactcattcattattcggtttactgttactgagtgcctcctttgggtaggtgtcattctagctgctggggattttgaggtgagctttgcttacgttctagcagagcagaatgacaaacccaacgtggaaaaataataatagtgaatacttgctttaaaagtaaaggatgggcagtagcatagagagtgagtaggaggagggggttccgctttaaccaggtagttaggaaagactaactccaaggaattgacacctgcgctgagacctgagtgatgagggatagccacacgaagatcttggggaacgttcaggcagagagaaaagcaaggaaaggctctgagatgggaacaaactaagtgtttaggagacagtcagattatataaggccttgtcagctgtggcgagtaaggagtttggatttggattttattctagttctaatagtaaatcattgaaggattttaaacaggaagtggtatcacctgattcaaatgataagatctctgcagtgtggagaatggactgtttccagctcataataggaggctgagaattgttaaatgaagaaatgaatttactggatgatatgacattttattattatactaaracaactcttctctttttgtgtactttcagagcattgagtggcctctgaaattcccttgggaatttgttagaatgggcctgacacaaccaaagggagttctcctctatgggccccctggatgtgctaaaaccactctggtgagggccctggccacaagctgtcactgctctttcgtttcagtgagtggagctgatctgttttcaccgtttgttggagattcagaaaaagtgttgtctcaggtttgtttatttccccatatgtttaaatttacttttgaatttttatttcatttcttatggacaaacctttttaaaaatattactagtgttttttccagttaaaaaatttatacgtttattgaaaaatttagaaaatataggaaagtgtaaatatgaaatccttcataatcctcctacctactgttaacattttggtgaatttcctttgtctttttttctgttttaaataaaatcaaaggtaggttttatatatctatagctttatcctgcttttttaaacttaatattactacttttgaaatttatagtattctttgaaaatatggtttttaactcttacataatactccattgtttcttgttttatttactcattccccaattcatagacattcagaatcttttttatatctattttaaaaattataaatagtggccaggcatggtggcttatgcatgtaatcccagcactttgggaggccaaggcgggtgaataactttaggccaggagttcaagaccagcctggccaacgtggcaaaaccccgtctctactaaaaatacaaaaaaattaagtggacgtggtagcgcaccctataatctcagctactcgagagactgaggcacaagaattgcttgagcctgggaggcagaagttgcagtgagctgaaatcgcatcactacactccaaactgagcaacagagcaagactgtctcaaaaaaaaaaaaaaaaacaggattataaatagtaatatcacatgactaatgtataacatatagctttttaatatttttttcctaacaaaagatatttcgacaagcaagagcaagcactccagcaattttgtttttggatgaaattgattcaatcttgggagctcgctyagccagcaagacaggatgtgatgttcaagaacgagttctttctgttctcctgaatgaattagatggtgttggacttaagacaatagagagaagaggaagtaaatcaagtcaacagggtaaatacaaggagctgaaaaaatgaagaggtatttattagccagaatgcacctaaaatccaggccaacattaaatataatgcatatatgctatagctttacctatgctgaattcatctcatagaaggatttatataatttcagtttgactttgttaggacttttagagctaataaaaattgtgatttggctaggaaaggtgaggtacattttataataaattatcttaaatataagaatgtgaattttatttttcctaagaatgagaaatataattttacttattgctaatagagaaggcagtttattcttgtttgcatgtcctaaaaaccagtattcatttctttctaaaaatgtttatgtagactgggcacagtggcacacgcctgtaatcccagcactttgggaggccaaggcagaagggttgcttgaggccaggagtttgagactagcctggccaacatagcaaggccccatatctgaatgaatgaatgaatgaatgaaaaayaaaggagattattatttccaatagtcttagtaatggaacatttccagttttcttgaggaatgagtttctttggttttaatgaattaaaatggcctttggaagtcccctccctctttctgagtctcttctccagatgagtttggtatccttaaattgtccctgatactttttcttttattcctctctcgttctcattcttttcctattttaaaaattgtcatatggaattgttgcatacactccttaggaatatgtcacactagaattaggaggtatccacgaggttatctaatcaaatcatttcaaaatgcaggaattccttctatagcatctgacaggtattcacccagcatctgctaaaatacttgcaaatatagggaactttgtactttgagggattacgtcactggagagctgcctgattattcaacaaatgattttgaatgcttagtatatgtaaagcctttctctgtctgcttttagacatttctttatccaggatttgcgcacctgcaacttagattgtcatttcaaagaaaaataaaaggtcgagtaaatcttcctctttagggatatgagagtcaagactttctgtagccatatatctccaccggttggtcatawgtatctgtctttttaagtagcctgtttaaggtgtaagccttcattggaggctcaggtgcactcaagtcaccagatragtgttctccsctttgggataaggcttttcataggttctcatatggagaatgtttctcttagctactcccttagccatgcacacaaagtagctctttggttaatgatttgtttctgggatatcttgatatcaagaagctggtctggaaagcggatataagcattctggtcccaagaaaaggatatccctatttgaatttaaatagaccttctgatttataatttttagaaaacttattaacaactgattgacattactttgtgttgtgtgtttgccctcagagtttcaagaagtttttaaccgaagtgtcatgattattgcagcaacaaatagacctgatgtgttagatactgctttgttacgacctggaagattagataagatcatctatatcccacctccagatcacaaggtagtcatttacacatttactctgtgtgagctcagcagaattgaattccaacttggatataggtgtccatggtgttctacttaccctgggttccrccttcttccttgcctggtggcctttcatgacatcataattttgatcttcctttgttggatactctgatcttgttcacagagaaacataagcctaaatatatggtggttattttttgtgttgtggcagactctaaatactgagtctactcagcgttattttgcaactagagtggaggaatcctaaagtgttaaaagggctttgaagattgagtcagcatccttatcatacagtgcagaartctgaaattacagagattatgcagtgtatcgtggtcaaccagtaaatttgttgtccgtaaagtacggtgcagaaatctgagattacagagattatgcagtgtatcatggtcaaccagtacattttttgtcgttaacatccagagccactgacagggagggtgaaaggcacagagtgaatttttttgttccttgggcttttatcaagttttgaagggatagaaaaataaaatttaatatctattatacctttaagttgtatctgataattcatgtatttrcttcttaagccatgtctgatagtattatttgtacccaagagagagatttagccgggcgtggtggctcacatctgtaatcccagcactttgggaggccaaggcgggtagatcaccagaggtcaggagttcgagactagcctggccaacatggtgaaaccccatctctactaaaaatacaaaaattagctggatgtggtggcaggcgcctgtaatcccagctacttgggaggctgagacaggagaatcacttgaacccgggaggtggaggttgtagtgagccaagatcgtgccagtgtactccagcctgggtgacagagcgagactccatctcaaaaaaaaaaaaaaaaaaaagattcataagttttttatgatgtcgttatttttaccattgtcatataagccattgatgacttagtctttctaacccctatatatattttctcggtaatgtgaaaggaaactcaagctaaaaatattttaataaatcattgtgtcaaacataaatgttataagatttaaaatactgttttttattttgttccagggcaggctttctattttaaaagtctgtacaaaaaccatgccaatagggcctgatgtctccttagaaaacctcgcagcagaaacctgttttttttctggagctgatcttagaaacctctgcacagaagtaagttaattattgaagaaatttgtggttcaaaacatttctgcatcttttcaaatcttcattcactcagcagtatttactaaaagcctgtgtggtaccatgtgatgtgaaacagacagatgtggccccatccctcacacagcttattgtaagtgtggggtggtgaggagggtggtgcagagaggcaaatcttaatactgagttggcaattgaaaatatgtagtgagttgcggaagtagagggtactgtgggagcacctaggaaagacaccagcccagatttggcacatcagagaaggctttctgagaaaggagatgtataaactgaaattggaaggacaaatcgggagttagccagctaagaagggaagggggaatgtttgaggtggagagaataaaatgtgcaaaggattgaagataagagatggtgtgacattattgaatcttagagtggagaatggcaagaaataaagcgaaagaagtgggctaggcgtggtggctcgtgcctgtgatcccagcattttgggaggccaaggcgagaggattgctttagcccaggagtttaagatcagcctgggtaatacagtgagaccccatctctagaaaaaataaraaattagtcaaatgtggtgttagtcccagctacgtgggggactagtagtcccagctacttgggagggggagatgggaggattgcttgagcctgggaagcgaaggttgcagtaagatgagatcgtgcygctgcactccagcctgggtgacagagtgagactctgtctcttaggaaaaaaaaaaagctgaaggagtagacaatggccaggacacacgggtccttgtaaaccactctaagataccctttttcgtaaacttttactaaatataacattcagaaaaatgcacggatcataagggtacagttcattgaattaaagtgatcacatttttataatcactacttatgtcaagaaatagaacattataaacaccccagaatcttcctttgggccctttcccaacctctgtcacctaccttcttccaaaagagaactattggctgggcttagtgactcatgcctgtaatcccagcattttgttggggccaaggcaggaggatcatctgagcccaggagttgagaccaacctgggcaacatggggagaccctgtctctacaaaaacttttaaaaaattgtcccagctactcaggaggctgaggtgggaggatcacttgagcctggaggtcaaggctgtagtgagccatgattgtgtcactgtacttctgcctgggtgacagagcaagactctgtcccccccccccaaaaaaaaaaaaaaacaaaaaacaaaacaaaagggaaccactctcctgactaacaacagtggggattagttttgtctgcttttgaactttatatgaatggaagcatgtggcatatgttattttctgtctggttctttaaccyaaaaagaaatttatccatagttttgtgtgtagcatagtttataatattctagtatatgaatattctacatttgtttatccattcttttattttggaatatctgggtttctacttttttgctattatgagttatgctgctgtgaacagccttgtacatgtctcttagttcccgtgtctatttatgtctatttgtaaacatagttagctacaaggagaattgctgggtcatagggtatgtgtttgatctattcctttataatcagtgctggctgaagactcttccctacttaacgatcaggaagatattctctcatctttaaaaatacatatgggttcataaaatacatattaatctgcaacttgccttttctttcttctcatttaatgctttcttttttcccattaatgtaaagaggttatggtctgcaaagtggatttctaatcaccttatttaactttttagcataatgtttttagtgacatgaaaattagaatcctatgaagtgaggctgagattttccattcagagtttaaagtattaccatatattgttaaaaaaaaaagaaaagaagccaggcgctgtggctcacacctgtaatcccagcactttgggaggctgaagcaggtggatcatgaggtcaggagttcaagatgagcccggccaacatggtgaaaccctgtctctactaaaaatacaaaaattagttgggcgtggtggcagccttcygtaatcccagctacttgggaggctgaggcaggagaattgcttgaaaccagaagacggaggttgcagtgagtccagatcgtgccactgcactccagcctgggcaataagagcaaaactccatctcaaagaaaaaaaagcaaaagaaattgttttctattgcttgtctcttaataggctgctttgctggctctgcaagaaaatggactagacgcaactacagtgaaacaagagcactttctaaaatcacttaagactgtaaaaccgtcgttaagttgcaaggacttggctttrtatgaaaacttatttaagaaagaaggattttctaacgtggaaggtatttaaaaatcaccttaaactcttgttcagttcacattaattgaaatgtgaacttgcctgtcgtttgcaacttcacacttttagaatttgtgtttatatttcctgtaagtgaataaataaaacaaaacaaaacaaaaaaaacttgtgcctgataagctaaggctcatttatttttaaaaggcatattaaataaaatactgtaatttaggaagaaagtgtgtgtgtgttgattttgttgtaaggggtggttggttttgggtgattgcttttttattaaaccctgaaataatttcatacttacagaaaagttgcaaaaatagtacaaagaatttttatgtgctcaaacccagattcactaatctttaacattttgccacatttgctttctctgtcttccccaccccttgtacatatacacatacacacatttttttttgagtggtttgagaatagattatatacataatgtccctttccccccttaatacttgagtgtgtatttgttacaaataaggttattatatgaccaaattcagcaaatttaatactgacacagtattttaatctatcatccagtgaatttcatgtatggtcacaataacgtcctatatggtaattttccccattacaggatccagtctaggatcacacatttcatttagtcaccatgtctctttagcctcttaacttgaaacagtgtctcaatctttcttgaccctgacatttttgaagagtatagaccaattattttattgagcagttcattcctggacttgtagttgatgttttatcatggtagattcaggttatgtattaccagtcgagcactacataggggcattgtattctcagagtatcacagctgaaggcacatgacatctgtaccttcttgataatgttaattttgatcatttgtttgcagtattgtctggtttctccactatactgctatttttcgttttgtagttgtaagtagttaaaagtttttaaagagacaggttacatgtacatttctattttcatttattacagaataatttagaatactagaaaatacagaaacaaaaaaaaaccctttagtgtttaaccttccagtccttcatgcatgtatagataatttttaaaaccagaaaggaatgatactgcataactcttgttcttctcacctaacaatatctggtaaacatcttactaggccattctccacccacaaggtgctaagttgggtgctggaacgtccagtgaacaaggcaggcatcagacaaattgtcagtgaattaattacaatggtcagacgtgcttcaaaagaagtagagggtacgatgagagactactgcatgaaatgtatgaagtcataaaacgttaagcagttattggaaagtttcctatttctgagtgcagccaggactactgggaataattaaagaaaaaacgtgatttgtaggtataaaatattcaattaaaataacacactgacctttgcttttgagtaatatgaaaatacctagaaaacttactggaattcttactatacattttctttgttggttattaatcttattgaacaaggcagccatcctgcacctgacaaaccctggcctgaaccccttaactcagacatctagctgtgggcccctgttcttttccagaaagtttctagtaggctggtaatttagcaaccatgcttgttcaaggctgagctgatttgaagatgtctttttaagttgtaattaaagtcagtcctcctcatctgtgggttccacatgggcagattcagccaaccatgtgggttgaaaatacttgaaaaaacaaacaaaaacaatacaacaataaaaaataggccaggcgtgatgtctcacacctataatcccagcactttggaaggccgaggcgggcagatcacctaaggtcaggagttcaagaccaacctggtcaccatggtaaaaacccatctctactaaaaatacaaaaaattagctggggcatggtggtgtgggtctgtaatcccatctactctgggactcaggtaggccccagaattgcttgaacccaggaggcagaggttgcagtgagccaaaatcacaccactgcactctagcctgggcgaccaagcaagactgtttcaaataaataaatacaaattttaaaaaatcacaaataaaatacaatagtgtaacaattacttgcatagcatttatattatactaggtattatgagtaatttagagatttttttaaagtataaccaggaggacgtgtgtaggcaacctgcatatactataccattttatatcagggacttgagtattcgtggattttggtgtctgagaggggtcctggaaccgattccctgcagatatagagggatgactgtaacttctcaacagaacattgaaagcttcctgagcataaagactatgtgtctcttctcactgaaatgctcaatagatgacaaaatgagatcaagaatttctttgatcctgttcgaatctgattttagaatggctctggacaacttccaaaagctgtattcttgatctgtgagaaaattaaaacaccagcttctgaacaccttctttctggtatactgggaagtgtaaacagttttccctataaactgaactcaaactgctttctgggccacattattgcttaaggctgactaaccttaaacaacatagaacatccctggaacctccaaaattcagcaaatccagtgctataagcctggtcataaggcagccactgaaggatgaggtgtcaggattaacacatccatcatcaggaacagggagaaagaatgtcaacaaaaaatatttaataatgaaatttctatttttctcagaaaagcctgagctggactgattaaattcctggccaggcatggtggctcacgcctgtaatcccagcactttgggaggccgaggcgggtggatcacctcacctgactcaggctggtcaggagtttgagaccaccctggccaacatggtgaaaccccgtctctactaaaaaaaaaaaaatagctgggcgtaatggctcacgcctgtaatcctggcaactcgggaggctgaggcaagaggattgcttgaacccgggaggcagaggtttcagtaagccaagatcgcaccactgtactccagcctgggcgacagatcgagactccatcctaaaaaaaaaaaaaaaaaaaaaaatctaaattcctggtgtatgaaccaagcagccatgtctccatgcccctgcaagcctgagtggcagtagctagagaaaggctctacaagttgctggtaactggaggtgggtggggaagaccccccaagggattatgggctccggggcagccacagagggtgatgctggtgagtgtcctgagtgggctgctttgggggctgccagggtctgaagggctgggagctgtgcctgtttctcatcctggtcacccaggcagtactggcctggcggtgccttctgggcaccctggccagtacacagggcttgggggcagggaggaccctaatttcatgtctatcctctggttgctggtggtgaggctatgaattccattacattttggagtgggaagtgttcttattgctaaagaactgaatgacaaacttcttttctggggtcttgccttcacaacctcaggcaaaagggcagaaaatctgaaggttcttaagtcacatacagttgacccttgaacaacacaagtttaaactccttgggtcctcttataattaattattttttagatggagtctcactctgtcgcccgggctagagtgcagtggcacgatctcgactcactgcaaactctgcctcccgggttcaaacgattctcctgcctcagcctcctgagtagctgggattacaggcacctgccaccacactcggctaatttttctatttttagtagagacggggtttcaccatgttggccaggccggtctcgaactcctgacctcaggtgatcagcctcttggcctcccaaagtgctgggatttgcttgggtccacttatatgtgaattttcttccacctctgccacactgaagcagtgaaccaacccytcctcttcttcctccttctcagcctactcaatttgaagagatggagacctttctgatgactcacttctgcttaatgaatagaaatatattttctcagccaggcccggtggctcatgcctgtaatcccagctacttgggaagctgaggcaggagaatcacttgaacttaggaggcggaggttgtagtgagctgacatcgtcccactgcactccagcccaggcgacagagcaagactccgtctcaaaaaaaaaaagtgatattttctttttatgattttcttcatttttattttctcttgcttgctttattgtaagaactttacctatataaaaagcaaaatatgtgttagtcaactgtttagattatcagtaaggcttctggtcaacactggattattagtagttaaatattgggggagtcaaaagttatatgcagatttctgactatgtggagagcaggggtgtgtaagttcccctaatccccaagttgttcaagggtcaactgtacttgttttggtgacagttttttattgttagttttttaagaaacagggttttgggccgggcgcagtggctcacgtctataatcccagcactttgggaggccgaggcaggtggatcacttgaggtcaggagtttgaaaccagcctggccaacatggtgaaaccccgtctttactaaaagtacaaaaaaaaaatagccaggtgtggtgacacatgcctgttagtcccagctacttgagaggctgaggcaggagaatggcttgaacccgggaggtggaggttgccgtgagctgagatcaccccactgcactccagcctggacaacagagcaagactccatctcaaaaaagaaagaaagaaagaaagaaacagggttttgctctgttgcccaggctggagtgcagtggcacaatcataactcactgtaacctcaagctcctgtgctcaagcaatcctctcgcctcagcctcccaagtagctaggactacaggcccacatcaccatacccagctaattattaaaattttttgtagactgggtgcagtggctcatgcctgtaatcccagcactttgggaggccgaggtaggtggatcacctgaggtcaggagttcgaaaccagcctggccaacatggtaaaaccctttctgtactaaaaatacaaaaaattagttgggcatgatgggcctgtgatcccagctactcaggaggctgaggcaggagaattgcttgaacctgggaggcggaggttgcagtgggctgagattgcaccattgcactccagcctgggcaacaagagtgaaactctgtctcaaaaaaaaaaataaaatttgtagagtctggctatgttatctaggctggtctcaaattcctggccttgagtgatcctcccacctctgcctccgaaagtgctggaattgcaggcctgagccacggcacctggccaacagaatttattgagtaaataattcaaaattgctgcatttgccgtaatattattaattgtaaaatataaatgagtcacccaaagcacagtgttataattcttgaatcagggaaagaccaaactacatattgactttgatatctcaaaagcttgatatacccaggcattatgaaaaggaagaaaagtgtggctttctgggtttaatttttattgctgcaaataggaataagatcttaaaggttatatgggcaaattatatctgtaactaactacgtataatttgtgaattttaaaaatgttttattttaaacatttccaaacatacataaaaggaagagtacaacaaacccacacatacctatcacctacgttaaataattattattttgtaaaatattcctaatttgttttttagttgaagtgtttttgtttctgtttttttttttgagatggagttttgctcttgttgcccacgctggagtgcgatggcgctatcttgactcactgcaaactccacctcccaggtttaagtggttttccttcctcagcccccggagtagctgggattacgcaattacaggcgcccaccaccacacctggctaattttcggtattttttagtagagatgttggccaggctggtctcgaactcctgaccttacgtgatccacccacctcggcctcccaaagttctgggattaca

SEQ ID NO: 95905 - DNA, 39897 bp, Homo sapiens
tacccagaccctgtcccacctctcacagcggtgctctgtaagaacccagggtagcctttgctcaaaccggagcccttccttttttccatgccaagagttaaagggattcgattcatttctatgagtcataataataaacaaaataggagcacctgcctccatgctcacaaacaagacaggacaacctaccctcttggatctccttctgaacccaggtctccaactgatggttctcacacaggtacaacctgcaggtaactcctgctgtttacctgagctgagctgtgcgctgaggcagaaatagcctggaatttggggatcatcagaactggagagggacctcagagattttcttttttttttctttttttgagacagagtctcgctctgtcacccaggctggagtgcagtggcgcaacctcagctcactgcaacctgcacctcccaggatcaagccattctcctgcctcagcctcctgagtagctgggactacaggtgcctgccaccacgcccagctaattttgtgtgcatgtgtatttttagtagagatggagtttcacgcattagccaggatggtctcaatctcctgacctcgtgcctcccaaagtgctggaattactcacagattttctcatcccgttccttgtcattcagatgaagatgccaaggtcagagtagagaagcctcttgtccaacatcacacaggtggttagtggcttcagcaggactagcctcagctgacttgactttcaggcaagagtccattgcattggaccacggtggggactgtgagaggacaggagggaaagcagaggcacagaatagcccaggccttcatgctcctgggaagggttgacatgggttccctgggctacaccatgggtcctttcctttttctcccttgggacttccacgtgaagaaggcacaggcagaacacaacatggagctatctgaatccagagagaagtaagaacgaaaggaggtgggaatgcagcacaggcagaggctggggaaaatgcttctgggtgcttttacatcctattttctaaattctatacagtgtggttttaacaataaagaggataataaaaatactctggggagagattaaaatgacagaaccagctgggtgtggtggcgcatgccaatagatgcacaactctggaggctgaggcaggatgacggcttgagcccaggaggtcgaggctgcagttgatcatgccgctgtactccagcctgggtgacagagtgagaatctgtcctttttttttaagggagagagaagaagaattgtttttttttgtctgtttattgttttttgttgctgttgctgttgttgttgttgttgtttttgagacagggtctcacttcgattgcccaggctggagtacagtggtgcaatcttggctcactgcagcctctcaacctccctgggctcaggtgattctcccacttcagccttatgagtagctaagactacaggtgcatgccaccacgctcagctaattttttcgtatttttattagagacaggtttcaccatgttgcccaggctggtcttgaactcatggactcaggtgatctacccacctcagcctcccaaagtgctgggaaaacaggcatgagccaccgcgcccagccagcagagatttttagaatctactttgagtagactgaaaagaaagaccatgttgaaggaatggtttaacagataaagaaaaaaaataagataaaaataaaagaaagaccaaaaagaaaacggaggagcagatgttaaaggagagatggggagaaaattcaacaccatccttgtagtccagtgaggaaactgacacagcagcaggacttggacagccactctggggctctgagcccaacctttttatatttatttatttatttatttatttatttatttatttatttatttttgagacggagtctcgctctgtcgccaggctggagtgcactggcacgatctcggctcactacaacctccgactccctggttcaagcgattcttctgcctcagccccccgagtagctgggattacaggcatgtgccaccactcccagctaatttttatatttttagtagagacggggtttcaccatgttggccaggatggtctcaaactcctgacttcatgatccgcccacctcggcctcctaaagtgctgggattacaggcataagccaccccacctggctgatcccaaccttttaacaggtcactataacctgagggagtgggaggacagagggctggagaggcagggagagtgagaagtcatctttcttggacacttgtcatggccagtccaggccttcccggctcccctcatctcatcccccaaggtgggctccctttggaagcagaaaaactccacccacactcccagaagacctcagaagcctgatagcagtgacaagaccacaggccctaaagaaaaaaagaaaggagagttagagggaatggaagaaggagaagaaggagagatgcccagaggggggttggcagccgagaggaggaccagaggagcagggctggagagctgggcccaaatcaggactgggggagagaagtggggtgccggggcgggaggagggacgatgggggtgatagagcctcccagctcttccttccctcccactctccctcctcctctctctctttcatgatcttgaaacaaccttcaagtctgggctggaggccccaggaggccagtcacttaggaaacaaaactgtttcttggagaccttgaaagcccatctgcagctgagcagcgtccccaccccctccctgtgcacacacacattctcccatggactctcacgtacacccacacccggcttcacatgagctccccaatggcccacatgcacgcacacacggactccacacttgatcttagccaaaaggccgagaagcgatgcgcactcacggactcacacgcacctctgtactcatgcttgcatacagacaaccgattcatagcagattggccacacatccgaatgagtgttgtcctctcccctgaggagctcctcctttggaatgtggtttggtaccaccactccgtctcatacctcacacaggacccaacgctcaggtcctcccagtcattaactagcacacatctgtacacaggcacatgcacactcctgtctctctccaactgtcttggtctctctctctctctctctctgtcacacacacacacacacacacacacacacacacacacacacacacacttcttaccaaccaaatatttgattcaggaccactccatccccactttgcccttggtggatccccctcctgatctgtgactttctcagcccactccccagcccaggcatcttggccttccatcctcctgctttcaagtctttctttctctctcctttgctcctcttactccaagggccttgatccaaactggtactgctgactgtgtttgaagaaacagtagcccaacccaggcactccagatcaaacgatcaggtgtctacacctgttaatatcctggaggctgaggttcatggtggacaagaaggaggtagaccactccagagcctcagctctcactgggcaaggagggtggtcagtgatgcacggtggaagtataggccctgggtgtcctgcccactctttgatttctctgagccctaaatatgtgagcagcagcgcccctcgggctgtgctctcgcccaaatgcagggcatggcagggagccccagcaggctgtaggggcagaggaagggcacatcctttccggtattgagtttggccacagggaccagagccagggcctttggaaggactgggcagtactgggaggtgccagcaggggtgaggggtgggatgaaaactgttagagtgcttgaggtttgcacaccttcagattcggggactgacgttttctctcctatctcaggttgtgttctggagagggctgggcagaagattacccaggaattccaacccaggaacctacggaacaggcgcttcctaaaccccaatttatcatgttgttcccacagcccccaggcaagcctgccccaatgttgatctccctagctgcctcggggccactctggagtgactttgctttagacagtctctcctggtgtctaaccacaggctttcccgctactcccctctcactctctccttaacacacaggggctgaactggtatctgttcccttcattgtttcctccctctgcccattctctcccaagaccaaatctgagctcggagaggggggccatgagaaggccctgttggccccatcctacccaccctttctgactgtaacccagagagggaaggagcgtggaagtgagatgtgacctaccaggtccctgtaatggaaaatctcaactgcaggcccggagggggccagttatttagggaattcagatgttagccttgtgccctgagagtggatttgctagaggagaggctgataatccctctgcagggagttccctctggggccagagatggacccagcccagccagcaggcaccttaggcctctggccaaagccccccttccctccctcccttcctctctgctttctttgcactcaggacacttagayctgccccactccgctggcttcccctcactccatctctgtgcccagagaaacaggggtactccaggggaatcctgtcctctgactgttcccagtagaaggcgggagcagaattttttcttttctctctgccccttctgggttccccttcctctctgtgcccctcatcctttggattactcatcaaatgagcagcaacaacacccctagaccagctggtcctgtcctgggtcatctcgttgtccccagtttctagctggtataaggttaaagataccctttccagccccaggcaaagccttaggcatttctgggattgctcctgactctgatgggcatcctcactcctcagacatttccaatctcccccacttcactgcagagaggcctgttctccagcctcagtcctgcatgctgcagctttgcttccccttccccactggaagaaggaaacagtcgctctcctttcccgttcacatgtctgatatttgctatgatattgaccttcacacacatcttagaggttctgtattttcctctcttttgacttctccctatcactactctactcaggcatagattcagtctagagctcttcaacagcaatgaaacggtaaacgaggggtaaacaaaacccagagatgtcatcaggtgcctgctaggagtcccacccgttcccctctagccctggcctgcccctccctaccagagtcttgattctccttcaaaactttggagaggttacatctggcagggtttggggacaccctcttgcctccatctccaaacttcccgctgcctcccgagccacctttgactcctcctgggccccccttccaggtgcctcaagtgcagaggtcagccttcggttcaaattctatttctgggcttcagtgtccctgcaacctctataatagaaggaacagagtggtctatgtttctttctttctctgggagattggatgtagactcgggagacctgagttctggctctgtcttatcaattcaaattgtttaatctctctgagcctcagtttacccacttggaaaagaagagttaggccacatggtctctgtcatcctgggattctgagtcaactgctccccttcagccagatcctagggggcatatccccccaacctgggacccaggcccccttcccttgcagcctctctcagttgtgagtgccacaggccagagggggttgagaggagccaagggggggcatgccgtgggacaaacgggctgtctagggccagtggctaaaggggcgggaggggaggagtcctcagggatcctgtttcaacaaacgtttctttcsgaggaggggaaggcgggggagagggggagaaggacctatttaaagctaccctgttgctttggctttctctgtctgccagggtctccgactgtcccagacgggctggtgtgggcttgggatcctcctggtgacctctcccgctaaggtccctcagccactctgccccaagatgggccgtggggtgagtatccctaaagagcaggggtcgcagtctagagggtgagggaggctgctgaggaaggatgaagtgggaatgggatktggaaggagcgggagagaggagctgagtgggatacttggaacttgaaastaacagtctccaaactaccaatgtgtgtacagatcccacggcggtcacataccctagtgctctcctctcctctgcmcgccccagccccctgcccacagttagacccacagcccaccacacatgccccctccatctctccctccaccccactcccacatctctmgtccttccctgcagcagtccctcctctcactgcatctcccggcctcccagctgaaaggatgtttggcactgtgagtcctcctgtctttgccacctcctgaaaatatccattcctctgggagtcctagcctgagaggctgggggtccattttgaggttagagaggggcagtagagcatccggctcccagagtcaccaagtagttccggacaccagctccaggggccctgagtgccaaggacagctgggcggggtgtggggaggaagaatgatgmcccagcccccaccccagcacccctccggatgtcccgagcagcattgtccgtgggttccaagccatgggctttgaggactttcccagaggctggtgacagtgacccccccccagtccacccgtccatggcattctgcagcaatggctacaccaagaggaagattaacaacaatggggcgggcagggagagggctttgaattcttggaaatgaaattcccatatggagaagagtggcccaatccttttacatgctgtgcctggctgctttccttttgtggaatactggcaaaagaggacacagagggaaagggcatgctgcggaacaggagrgtatgaggaagactgtgcctagggggagccgtgggtgtttctgggcccaggaggagtcaggcaaggacatgttattgcacctagttgagcagctgggaaatcctgagcctggacaccagggttcctgagctagggttggagccataaatagaattggagtgcatgcatgtatctgtgtgtctgtgtctgtgtgtgtgtgagtgtgtgtccttgaccacgtgttctccataggcggggagtcctgcagttactcatggatgagtacctgtgtttgtgtctcagcaggcaaatttgtaaatgtacaagccttcaagcctgcacaagcataaatgtcactgtgtgggggtgcttgagagtctgtgagcctgcccttaggagctgtgaggtatgggcttcacggaggaagargtcatagctgcaggaagatatactgtcttgggaccttcagctgcatcttgacatctctggctccccatggaaagggcatccctagctgagatgcaggacctctgagaagaggcaggggttaaaggatcagataagccctccatttcccccatccaagtgaagagagaaggaggggaggtagccccctaccctgctccatcttagagcaaggtagacccagctcaggaggtcttgcttgggaagtgatgagaccttgacttttccagtctgtctttttcccctagcacccccaaactccccttaatcaccatcctaagttgctgtgggtgatgcaatagcaagatgaggagcagatctgggctgtttaaactaagaggctgggtgaggtgggggtatttagggcctggagcttagagttcaacctaccaacgacccctgaagagggaaggcatctgacacccacaacctgttctagggatgatttttcctccaatcccttctcccctgcatctccactgcagaggcaggcttcactgtccccccattacccagtggctgtgaagggcagcgtgggagttgggggaagggacgacactggtgggagggagcccagcctgctccagctaccacggagaggctgagatggggggagcgttggcggattcccagctgcccccactctgtcccagcctctggctttctcaaaaaggactctctgttctccttcagcattcaagacccagagagggggacttgtggttgggggagggaggagtggagggaggttgggggggtccttgcttcctctctttctttcttgcctgggcagccgctggccccaaatctctgcaggctcctggctgcagagcctgagatctttgccaggacaggaggagggggaaggggcagtgtgtctcaagctctaagcctgctggagagcagggcgggagcttgggaaaaggaggcactgcgtggagctgcttagctcagccacaatccagcatgccaaagtgcatggaccagcaagtttttaaaaagcatgcattttattccaatttttatgaaatttatttcacatctgaatatacagaaattcctctgcaccctgctcttctgcccacagacccagccctgctcctctgtgtatgcctgggcccccttctgtccctgaagttcctgagggtcacactgaagctcagccagcctgatctcttgcctctgttcccttgattgcatttcttccttttstcagctctgtcccaccacagacagttagtgaatgtaaagcatttcaatccactcaattaaatgaatcctcttaggtcacctgagaaaggcagaggcagaaccactcacaagcctttccccaccccttccattgggctgctcggtctccccaagaagatctgcctttaggaggccaaaattataccagattcatagatgcttcaggtggagacaaacccacgattttactggtcaccttttctgagaagagcacttctgagcaacacagcctccaaaagctcatatctttttaaatcattggtatcttgggaacaacagtgttgacttctccttgcatcccccacccctacccttgcttctgattgtactggtcagacttctacctctcaagatgctgaattggcgacctcttatgaacaaggcagctgccatacttctgggattgctcctgactctgataagtaaaaaaggcattaccctggagcacaaaagtcttagggcagtgaagctattccatatgataccacaatggcggatacacgtcagtatacatttgcccaaacccatagaatgtacaccaagagtgaactcaaacttaaactatgggctttggacgataaagatgtatcaatgcaggttcatgattgcagcaaatgtaacactctgatgcagggtgttgatagtgggtgaggctgtgcatgtgtgggggcaggagatatatgagaactttctctacttcccactcaattttgctgtgaaccagaaaattgctccaaaaaaagtatattttttaaaatgcaaacaaaacccccaaaactgcattatcctgcaaaaaaaaaaaaaaaaaaaagcaaacaccttggctgtggaccctacccaggtatccactctttatgggaaacaaaagttaacatcatagtgtgggaaaactaattcctgaaagcctagtgcagactttgcagaatccagtggagaaataggcaccaggtggaaactgagcagcccctctatgacaaggactctatttcctgagggaagtgggaggagagaagactggggcagaagaggaagtaaraaggtacctttttgggaacttttcatggctacccaggccttcctcagcctctatcctattctatcaccccaagagggcctcctcttagaaggaaagatttcccaccctgtccccaagaagttccctgtgagaccctggaaggctggtagtggtgagcccacaggccctggagtggaagggaaatcaggagcctcataagactacaattaaaatgtccatctgctcaggcgcagtggctcacacctataatcccagcattctgggaggccaaggtgggaggatcacttgagcccaggcaatatagtgagaccttatatctaaaaaaaaaaaaaraaagaaagaaagaaagaaaattgttttaaattagctgagcgtggtggtgcatgcttgtggccccagctacttgagaggctgaggtgggagtattgcttgagccctaraagcggagggtgcagtgagctgaaattgcacactgcattccatcctgggtgacagagtgagaccctgtctcaagaaaaaaaaaaaggccatctgattcaccagatgacccaggaatgtctagacttaaaaactatataaaatgtagttttagatttactctcagatacaatttcttatgttttgggacaaatggggctcagttcccatgttacccaattgtgctttgggggtccagtcctgtgagttgcctcccgtctagtaacgggcaggcctgcccagcaggatggagagggctcccagcacaccccatgtctccacttcctggacatgccctgactctccagctactgcctcctctcagtccatcaggcctgctctttccatccctaccattccaccaccagacctggctctcctctggacacgttcctgcctaatcccctggctccccaaagactcttrctcccccaagttcctgagtatttctacccctctctaagtaaaattgccatggtgttgggctaagacattcctacagagtgattctactccctcaacaaccccccacaaaaccctgtccactcccttccagaattttcccaaatagtgtaggatacaggttttcaaaatttttgttttgttttgtatttagcagcagggtcctttcaacaaacaaaatcttagcagaagcccaagcattaaaccactcaagtggtgcttttcagtcctgagcccctcacccttctctgaaactcacatgggagcccctggttctgccaatagtctacaaactgagggcctagggtccctcaccctccatcccccctatctcccccaaggcagccgctgcttttgaacacacacccccactgcctgggctccctggctgagtggtgggaatggaggccccagcccctctcttccctgactctcyggctctycctccctcaggctggccgtgagwactcacctgccgccaccacggcagagaatgggggcggcaagaagaaacagaaggagaaggaactggatgagctgaagaaggaggtggcaatggtgagggaactgctgggccatggaggaggggccccatgctgggagagctgtccctgcagcccattgcactcagagaaactccrtgtcccccatgctgctcaactcacccctgtgccctgcagtaccctcatatgcatcttagatacctcctccccaaagtaactcaccctcccttccccaggatgaccacaarctgtccttggatgagctgggccgcaaataccaagtggacctgtccaaggtgagtggaggggcttctagggaaggaacaaaagaggcaagaaaaccatgcagcatcaaggtggcaggagccttaaaactgtaatccagccttctttacagatgaggaaactgaggcccagaaacaaggactggcccaaggacatgcagctagttggtggcacagccagaactagaatttggatcccctgcatcctagcccaaagctctctccctgtataccctagaagccaggactccctatgacccaggccccagagggcctccaggcagggcccttccctataccccaagcaacttcagttgcacacagccttccacagagctgacagctgatgcacatgggctgacagcccattcctgtggttacagtgatttgctgggcccctgctacatatgtgacattgtgatagatgcgttacatacatttctctaatctttacaacaaccctttgagataggtattgcagacctgtttattaaacaaaggagactcagagagggagagtaacttcccaaggtcacatgaacagtaactggtacagtcaattgctaagcccttcaattaaaaatttgtttaaaaatcattaatcaaaaaatgctgggtgtggtggctcatgcctataattttaccactttgggaggccaaggcaggcagatcacttaaggtcagcggtttgagagcagcctgggcaacatggcaaaaccccatctccactaaaaatacaaaaattagcttggcacagtgatgggcacctgtaatcccacctactcgagaggctgaagcaggagaatggcttgaacccaggaggcggaggtttcagtgagccgagatcataccactgtactccagactgggcgatagagtgagactccatcttgaaacaagcaaacaaacagacaaatatttagtgggtgtatatctcctttatgggccttccctgactgctctttctaaaattctatgcccctattcctttaccttactttattttccttagtaacacttttctatctggcactaatatgtatttgtttattgtgtgtcacctctccagatcataagctcctcaagggcagrgactttgttggtcttgtccatctctgcatccgcagagtgacaattgtgcctggcactggatatacatttattaaatgaatgaatgaatgaaaaaaaaaaaaaaagaaacggtccctgctttaaaggagctcaaagtctagtagcagaaaaaatgcaatcctaggattccaatgcaatatggtgagtgcagctctagaatcaagtatagaacaccatggggaaccagaaagaagcatctgaaccagcctggggctgagggaatagggccaggcaaggctttctgtggaaagtgacaggtgattgccaaagttgtgtgacactgayggtcaataatgtaggacttgagcagggtgtggaggtgcccacctgtagtctcagctacttgggaggctgaggtggaaggattgctttagcccagggttcaaggatgcagtgagctataattgcaccactgcgctccagcctgggcaacatagcaagaatccatctcttaaaaaraaatctaggactctcctagaatccttgataaaataatctgaaggaagagagatggggaaaaaacagttgaggtgtctttccagggagcttatccagactgcctccaggggagatgttatggccctaaccataggtgttgtctcaatccaatataattaggggtcaagcccagtcaaacccttctcagccctcaagccctccaagttgcatcacaaatgccacctcctccatgtggtctctcctgatggtcccccaccccttccaaccaggtgggactttccttctgggcattcttcccatgcccgggagctgaagggatgggcatggtgactggctgggttggctccggatgcgtgcccctacgcctctccttgctccctcagggcctcaccaaccagcgggctcaggacgttctggctcgagatgggcccaacgccctcacaccacctcccacaacccctgagtgggtcaagttctgccgtcagcttttcggggggttctccatcctgctgtggattggggctatcctctgcttcctggcctacggcatccaggctgccatggaggatgaaccatccaacgacaatgtgagcccacaygccygacccgggaacagcccgtgactgtcctccaaccctgaacccccaacacagtggggggtgggcagggaacaaggccctcacataacagtcctacagatgcccctgcatcttaggctggaaaggggagaggcttctatatatatctgtaaagtactcctccgccaacagtgcatacacattcacatactcattaattaatgaaacaatctctccctgttcctccccgcttaagtgagcctgtctgtgtgcctgggtcttcatcccctagcaaagtcctaaccctgggaacttcctaagactttccctcccatttctagtcttaacaggcttgaggttggcagatcaagggggaggttagtgagaagggctttcccctaccatcatcactctcagtcacagacaaaggtctgggctgtcatcttggatggcactgcctgctcatcccaagtggcagctgcccctttagggttkgggggaaggtcaggtccctgaaactctttctccttaccagctatatctgggtgtggtgctggcagctgtggtcattgtcactggctgcttctcctactaccaggaggccaagagctccaagatcatggattccttcaagaacatggtacctcaggtaagatggcagggctgggctctgggctaggctgtaaggttttggcaagagtccagctcatcttytgtcagctcccaggcwctaagatagagatgracagaaaagatcctccagctttccatgccagcacctaattgtttatggggcttctccttctgcttgacggtgtgggagaccagcaggagaagaaggcaggggcagagacaagcatttcatgagctgcctgtggctccccacagcaagcccttgtgatccgggagggagagaagatgcagatcaacgcagaggaagtggtggtgggagacctggtggaggtgaagggtggagaccgcgtccctgctgacctccggatcatctcttctcatggctgtaaggtgaggaggtcataccagagcaagcagttgagtctaaggagaaggctgtgtgcagagctgagaggggcccagtgaggtttaaaggtggagagacccaggtccaaatgtcaacaccatgcctaygcccctgctaaaccttctctcagtgtggggtgcttgtgcagtgcctccttgcatctgtgtgttatgaatgctctatgccccaggtatttctttgttgtccactttttagcaatcrtgtattgaataccaattatgtgtcagctgctttatatatgttcgatgtgctatctgatgtaattctgaaagagtggtgtaatcatgcagggctgctgmatgtggccacacacgttgcatcctgaatgaccccaggaggtgcattttcataactacagtgttagtgtctccccctgtggttgtgcarggcagagattctgtttacattcaccattttacagttgagtacatggaggctctcttggttaagcaagtaacccgaggtcacataagaagtcaggaggagtcagaattccaaaccagggcaggggcaatagatgagtaatgccataaatatgtgatgagggcaagtgtgactttgttcctcgtgtcatgaagattgagtgtggttggaggtggttcaggagacagctgtgtgcatacaagtggctctgccagtctgatgactatgcactccttcctcctcaggtggataactcatccttaacaggagagtcggagccccagacccgctcccccgagttcacccatgagaaccccctggagacccgcaatatctgtttcttctccaccaactgtgttgaaggtgagaagccaggctgccccctgtaggaaagagtctgaatcctgaatccatagtcaggatgaagggctctggtagtacttaccwggcaaaagctctgccattggtggggcaattgaggggtcagggggccctgaatattatggaaacaccctccacagagcagggtattgactgagggcagcctgactccatgggaaatgtatctcccttccccagggagatctctgttctgtccaccccaagacttgagtggatttcaaagctttcaggtattgggttaagaaccccttacgcatgcgcacacacagatgcacatacgctcagaaccaacctggattcttaggagtctttggatttgattgatgcttctattccttgtggttctgggcctcgctgccccyttcgataacctttgctttggccagggccccagggtctgggagggccaagaaggcattctggccaggtgaacacttggggcctacttcaggctgcttctaacctttgttacatcaaaagacatgtttcaccatgcacagactacccagtttgccccatccctgttctgggttctagagataaacaaaggtcaataagaactcccagagctgccatyacttaatggcaggggtccaagcacaactgaaacctgtgccctctgtggtaaagccagtgagcagagtcagggctgcatcagagaaggagtaggagggaagagacagaaagaggcctcactagaccagtggcctctgaaaatagggcaaaggaggcctcatatcccaatccacacttcccctgtccattactcatttctcctcagtgtattatgtttctctgtggtttttttcccttcttcgacaagttggaattccactgcttggaatccatgagggattggttccaggacccccttcgttaccaaaatctaaggatcctcaaaggccctgatatgaaatcgcataatatttgcatataatctgcgcacatcctcccatatactttraatcaactctagattacttataataccgagtgcaatgtaatttttatactgttttgtttttaaatttgtattatttttattgttgtattgttatttttatttagctccaaatattttcgatctgaggttggtygaatctatggacatggaatctgtgaatatggagggccaactgtacaaataaaaatcaccacacattacatttcctaagtttgttttttgttttgcttttgagacaagatcttgctttgtcacccagactggagtgcagtggtgcaatcacagctcactgcagccttgacctcccaggctcaagcgatctcccacctcagcctccagagtatttgggactacaggcgtgtgataccacacccagctaatatatatatatgtatattagagatggggtctcactatgttacccaggctggcctcaaactcctgggctcaagtgatcctcctgcctcagcctcccaaagtgctgggattacaggcatgagccaccgagcctggccaaatttcctaaatttttaatgtactgagattttgaaatttacatttcccacaattgatttattcagaaatgcctagtaatacattcctattgcttactctgcaattggctttgaaaagaggaaaggaaataaatgagatatttgttgagcacccgctatgttccaggcactggcctaagtatattaaagcacaatctcatctaaatattaaaacagcaccgagataggaattcaaataaggattcaaacccaaatttggctggctccaatgtgcatgcttttttcaatacaccacccttccttcccagaagacccctgtaatgtcacacaagggttagcaattgcctggcttcctctatagagattcatgcctaatgttgagaaagaaaatcttaagactggatggaaaatccataatgagtgctttactttgtgttcataatatacttttggatggtatcaagtatgggaatgattttaccaaaatgccacaggcaatttttatttattgaatcttgtctatttgaactttgagattatttgcaagcttctccccaggctcgagtacaagagaaaataatttgctgttgtattgattcaaggattggcgatctatccagggaaaggaaggccaagtggggacaacctactgaatgtggcctccagatctgcggctttggctcacctatcctgtgatgattttccttgctcaggaaataggatgggactgcagtccctgggagccacaaggcacmcaacctgatgccccaccatgttgcaggcactgccaggggcattgtgattgccacaggagaccggacggtgatgggccgcatagctactctcgcctcaggcctggaggttgggcggacacccatagcaatggagattgaacacttcatccagctgatcacaggggtcgctgtattcctgggggtctccttcttcgtgctctccctcatcctgggctacagctggctggaggcagtcatcttcctcatcggcatcatagtggccaacgtgcctgaggggcttctggccactgtcactgtgagtgggtcaggctgaggtgccaccaggggagggtctcactactctttcctcaragtgatagaggcacagttgcttgtagcttctcactactttttccccctagagtcacttattggatgcgatactcagagatcacttaatacatggcttagggtatgagttgagaaatctcaggtggggctattcttaggcactcagtttctcttttggagcttgtcacggctgccttttctcacgatctgccagcagtctgggtctcattccgtccaagtctcctgtagaggctgtctcaaaggtcaccagtcactaactagcaaatccagggaccttttctcagctctcctccctaactctgctgctgaaacagatactgctgtccaccctcctaccattctctcttttgtcgattgctgtgatgtgtcactatcctggttcgcctctcctctgtcccttcctgctccccctacactgattctcaggcctcagctgtctgttcttcctacaccctgagcaagagccaatctcctcccagtttgcagtgtcccttctgtgttgatgactcagacatccctatgctcagctctgctctggccctctctggagctctagtcaaacgtcttaaaccccctaatgggcatttcatcttaacagatactcatgatctcaacacatctaaaattgaacattcattatttacagctaagtcccacccattcaagttagtggagtagaatcaggggaggaggaatggagccacggtctagggtaaggttatggccatctccggcttcagccttaaccttttttattctcctctttctctaccaggtgtgcctgaccctgacagccaagcgcatggcacggaagaactgcctggtgaagaacctggaggcggtggagacgctgggctccacgtccaccatctgctcrgacaaracgggcaccctcacccagaaccgcatgaccgtcgcccacatgtggttcgacaaccaaatccatgaggctgacaccaccgaagatcagtctggtgattgggtgctccagagggggtggataggattagaggaggctgagggcagtggcgtggtggggtgagtggttgagataaaggctctaaagggagccacgctcctggttccccctcatttcctcccaggggccacttttgacaaacgatcccctacgtggacggccctgtctcgaattgctggtctctgcaaccgcgccgtcttcaaggcaggacaggagaacatctccgtgtctaaggtagggggtcaggacacacaccaggtatgttttgggggtgtctccaaagcctcttgctggccccagctttccttctcacatgatgtggctgccttgggggtttcagtgccgccttcacctgatcctccactcccttccctcccatgctgacactgaattcttgtctcttctggcagcgggacacagctggtgatgcctctgagtcagctctgctcaagtgcattgagctctcctgtggctcagtgaggaaaatgagagacagaaaccccaaggtggcagagattcctttcaactctaccaacaagtaccaggtctgcttgggttgccaggacagaggaagagagagggatataaatgggtgagggtggacaaagccaaggggaatcatcactagcaggagtgggggtgtctgagggtcawgttccctccccctgctaagtcccccaggacagctcatatgactgcatgtctgattgcaactagccccagctcccaaascttactccatcccttactacaatctgtcactctctcaactcttcttcccatagctccgcatcctctggcctagccttccaactcttctaccccagtcagtgaaaccataattctgtaattcctttatggtgccccttagcctttaggcacctgttaaatgccaagaatgcaatctcagcattccttattatccatagaggtaaagccccctgaggccaggtggtggtggggatgctgaggagggagccgttcagcccctagcacagtgcctgtcttaacctgacctcaataaatatttgttgaatgaaagactgtcctacggaggtggctctcaggttacaagtgttggaactgtgaggtctaaacacccccctgcacaaggagattctctttgttgacaatctttgatgggttggggctacttttctaaggtggtttccttaccagctgctgctctatgccgcgctaccaagacaagtatggccctctctgtaactacctgttgtctctccagctgtctatccacgagcgagaagacagcccccagagccacgtgctggtgatgaagggggccccagagcgcattctggaccggtgctccaccatcctggtgcagggcaaggagatcccgctcgacaaggagatgcaagatgcctttcaaaatgcctacatggagctggggggacttggggagcgtgtgctgggtgagaggccagaaacaggaggctcagaaggggattcccaagcctctgyggcatccctggggtgggggactgtgggggcgtccaggaagccactctgcggatctcactgatcccttctgsccccctttaggattctgtcaactgaatctgccatctggaaagtttcctcggggcttcaaattcgacacggatgagctgaactttcccacggagaagctttgctttgtggggctcatgtctatgattgaccctccccgggctgctgtgccagatgctgtgggcaagtgccgaagcgcaggcatcaaggtactggcctcccatcctcccctccattctagcctcccccatgccagagttcaaggagctgcagtggctgctgccctggaaaggcccaggccacggtggcctccttcccactgactcagagaagaagctgtccatctgcaaggaaaggcccacccctgccttggggcactcacccttatcccttttgctcagagaggccagtgtcccatgcccctcctctccctccctggcacagctctttgtcccatctgcatgtgtacccttccattctgatttgaagcataatctggcactcctatcttgaagacctagttgtcctacccttcccaactactgcccaccctctctgtcaacttaggatgggattagcaggctcttgtatgctcccagtggctcagcccataaccccacagaatgcctcccactcaaggttctcttgttcaactacaattgcttctcactgaccactccctcctctgtgctatgtttgttcttcattcaacaaatatttactgtttactatgtttcagacactgtgcaaggtgcaaactctagcaccttgcacagtgcctgatacatagtaaacaatttgtgtcacatgacacatctagatgggacaatgagctgtgccagggaggacacatataaatcaggcactattctaagcactaaacctctatgatttcatttaatctacgcaacaaccctgtgaataagcaccagtatttttccttttttacaaagagggaaactgaggcacaaagtaacatgccaaggccacacagctagtgtaagtcatagagcaggtacttgaaccaaggcagtctgctatttcttaactatcataccaggagacttgtttctgtgggtgtatgtggtttctgaaccccataaccactctgtctccgaggcaggcatcattatccctgttaaaagtaaaacaaggctgggcacagtggctcatgcctgtaatcccagcactttgggggggtccaaggctggtggatcacctgagataaggagtccaagaccagcctggccaacatggtgaaaccccgtctctactgaaaaaaaaatacaaaaattagccacgtgtagtggcaggtgcctgtaatcccagctccttgggaggctgaggcaggagaatcacttgaacccgggaggcagaggttgcagtgagccgagattaggccactgcactccagcctaggcgacaagagcaagactccatctcaaaaaaaaaaaaaaagtaaaacaaatggaaactgcaagtgggtaagtcttttccccaaaataaaaccaccagtaagtgatggastgggactatgaagcatgatctgcttgaccggaaagcctgagctcctgctgcttggccaggtgcctctctctgtgatcagaaccatcacggaggcctgggcagaggacctctatgggaagtcagctcagggaagcattaattctgcctcagagaactggacgatgtttgacaaaaggaatgatatttgagctgggctttggaggtcaaagagtattctgcaaagcagtgagggagaggaaggcatgtcaagatcagggaacagtgtgtaccctggcgtggctagactgtacggagcgtgtgtaggggttggcaggggagaggtggcaaggagtactgggggttgagactggaacaytgggtcagagccagttggaaggacttggcttaaatgccagacttgggctttatcctgcaggccacagagagccatcagtgtcacgggggaggttgagcttttaggagactacctggtttgaggagggactggatttggggaagaactggagtcagggagagacaggttaagaggccattgccatagttcaggcaargaatgatgacctgaactagggcagaaacaaagggaatggagaggaatagccatgtctgagaaatgttttgagaacttggtgaccaaactggatatggaaggtgaggaagatacaggagagaaggggacaggatgaatagagaggacaacatctaaggtagggagcagtagcaggcttggtggggtggcaggagtagagaaaaggagttcaatgttgaccttaagcttaaagagtctataagataccccaggaaagacagatgttccagtgaacattggagtatggtttagagctcatgaaagatggtcaggactggagatttgaatctcattagcacaagggtgcaaactaaaggcttatagtatgttgtattatattgcccagaaagagcagacaggtcaagtgaagggaggagaatgaaatcctgtgccaaaccaacatttaggcacaagaggaaccagtgaggaggggagagggtggtaggaaccaatgccatttaatcttcatgaccacctagaaaggcaggaatcatctctgcattgtgctgagacctcagtgcttcacttgcctaaggtgctgtagctggagaaggtcggtgtttaaacttgagcccctcattcaactccaaagccactgcttcttccatcctactaggctgccaccctgagaggctgggaaagagcatgcagaggagtggagggaaaacaggaatggaggagtatgtggaagccaggggagggcagggtttcaaggagaagaggtcaacggtgccaaatgcctcagaggggtcaagtaggatgaggacggcaaagacacttttcatttttcaattgagaggcccctgtggcctttgggtggcagtttcagtgaagtggtgggagtggaagataaggcagtggggaccatggaggcttccttttcagtatccataggacttgccctgcaagcccacacatgcaaatgctatcctaacccaactctgctcacctcatagcctcttagcccatcagatgccagccaccctccccatcccaactccattcactctgcaacaatagcaatgaacattatggtgaaggtagggaccaccgtgctcaccagggaggatgtcagaggcagatgctcaaggtggtggaggcaggggtgttgtctccatcttattcctgttctgtccattacattgctgcagtgatcaatatttgacactaagaacctcatgtcctatatccaggtccctgtgcatttgagcaaattgtagcccctctctaagccttggtttcctcatgtgtaaaataaaggagttgttaaagggtccttccagctctgactgccttgaatcccatgaaatccaaaatcctaaaatatctcctaaataatcctaaagatttgaggcttctcttccaggggatcctcatgaacttgttactctgttatggatactttcctgcacttaagcaaactatctctctctaaccctctgaacataactcaacttgccattatctttcctcctcacccacccactcaaattcacacagacacacacaaatccccacctcacatacacacacatcccacacacacacatagacacacacaatccccaccccccacacacacatytcacacacacgcacacatacacaaatccccaccccacatacacacacacacacataccccacacacacacacacatcccacacacacacattccctctcacacacacacacaatccccaccccctcacacacacacaatccccacccacacacacacacacacatcctacacacacatacacacaccccacacacacacacatacacacacacacatacaccccaccccagccactcccctgcccacagacgcacacacacatgcccttatttcggttgggatctgccatccccagacatctcgctatctagctttctcttactttgggagaggaacaggagggggataaacccttaatactactttcctgttgtctcctctccttcccactaggtgatcatggtaaccggggatcaccctatcacagccaaggccattgccaaaggcgtgggcatcatatcagagggtaacgagactgtggaggacattgcagcccggctcaacattcccatgagtcaagtcaaccccaggtgaggcctctgcrggaagcccctgtgccctaatcaacmcgtcctcttgcacagaaggcttgggtgtcccctgggagtatttggatagcatttctgggacctttataggccttacctctgacactattgtgactggttcctcagccctragcttgtatccaggctgtgccactgaatacccatgtaaccttggagatgtcacattcccttcctgagcctccattttctcaccacaaaattaggatgccatctccactgctgtaggagtgggatgtgagtaaagaaactagcccagggcctagcaaactgcacttacaactgcgatgatcccatggtgaggatttagactcacattctcaaagagaaatgggggaagtgagtactgaggagaggagaactgaagcaacaggggaagcaggctcagcagggagcctgcaggctgcggtggtgaagagaggcagggggcaggaggggctggtacaggtgccaggggtcagctgtctctgtccccacccaccctccagagaagccaaggcatgygtggtgcacggctctgacctgaaggacatgacatcggagcagctcgatgagatcctcaagaaccacacagagatcgtctttgctcgaacgtctccccagcagaagctcatcattgtggagggatgtcagaggcaggtgagcacagccacgggaggcagatgacaggcagggaccggggaggcagggacagggccaagacaagcatggagtgagaggcgaggagccaggcttgggaaggggtttcgtcctcaagtgtggccgtcttccctccagggagccattgtggccgtgacgggtgacggggtgaacgactcccctgcattgaagaaggctgacattggcattgccatgggcatctctggctctgacgtctctaagcaggcagccgacatgatcctgctggatgacaactttgcytccatcgtcacgggggtggaggagggtgaggaggctgcatgggttgggatggtttgcaggatactgaagccggcacctctgttccctgtccctttaccccagttgaagaatcattccacaactctaggcagcccagcccactttagcttcccttgaacacaaaatcttcctctcttgggaagacaggcagccatgcttcaggggctgggggtggggaagagtccctctgacctccctgatgccctcagaatctccccacaggccgcctgatctttgacaacttgaagaaatccatcgcctacaccctgaccagcaacatccccgagatcacccccttcctgctgttcatcattgccaacatccccctacctctgggcactgtgaccatcctttgcattgacctgggcacagatatggtgagcgcaggaggtggaggaggggacaggcaaggcaatcgtgatggcacagtggcagggaggagaggtgcactggggcagtggccccagctgtgggggttacaggagacaggcacaggcctggaagacaatggggtctgaatacacgcttttttaactgtgtcaacgatcgtcactgtcgaagrtcaattgcttctgtcatctcctacgtcccttcaaatgccctcyctgccccatttcctaccccacacaggtccctgccatctccttggcctatgaggcagctgagagtgatatcatgaagcggcagccacgaaactcccagacggacaagctggtgaatgagaggctcatcagcatggcctacggacagatcggtgygccaagccccgggcctcgggagggaaccccaacagggttcttttcccagctttcagaggaatgagccccaagcaaaattccaggacagaggccagctacccaagggtcagggacctccatctctggccctgaggggctgtgccccttctgcttcctgctctgaccctgcccctgcctttggccctctacccacagggatgatccaggcactgggtggcttcttcacctactttgtgatcctggcagagaacggtttcctgccatcacggctactgggaatccgcctcgacygggatgaccggaccatgaatgatctggaggacagctatggacaggagtgggtgagtggtgctgtgtaaacacagyrcacatgtgtgaaggtaygggaagctgaatgcctggcaggagtggccagtggtggccaactgggactggggctaggggtggatcaggagaaaccatgctaccttctggtcctaccctttcctccgacactctcatctgtctctgcccaccctccctccagacctatgagcagcggaaggtggtggagttcacgtgccacacggcattctttgccagcatcgtggtggtgcagtgggctgacctcatcatctgcaagacccgccgcaactcagtcttccagcagggcatgaagtgagtgcccacccccatggcacctacccacccaggctctgggcacactcaccaacccacacaggccaagcttccaactcagccctggaccagagctgtaaggagggcatcagattttaatcttccatctgtatatccatagataggtttcatatagaagagagaagccatgcttcaggctcctaattttgcattttgttattgtctctctccacctttcttctctccttctctccctcccttctttcccccatctcctacttgagtgccacctgctcctatcctttgcccagccctaaatccagtgtcttctgtgcccacccctcccctggccttccgcaggcagtctagtttatagcacttgcactgtggttctggaggccacgtgctgccgagggtcgggttcagcgcttcttgcagtgtgagttccagcgtgccaggcactgtgctaagtgcctaacacattgtttagccccacgatagctctatgaggtgggtattactgtttacatttcatggataagaggccccaaacaggttaaatgatgtgcccaaggtcaccaagatggtaagggttcaccagatctgtctctaaaacccagccctggctactacccaacatttctgtgctcacaccatctggcactgtttggaactcagtaatgactgtgattctattatgggtggtggttgagcgctgaaggtttcatgctggttccttttattttctcctaccataaacaatggccacaattcctcacatgaggttgttacagtttcttagtttggggctggggagggtggggagaagaatgccaaagtgaagttaataacacttaagatccaagggagaataaagtgaaaagcctgttagataaataaaggtaacatgaaggaaggagattccagtaagctaaaaatactaatggaaaaaaaatgcaatttgaagagaacaaggagcagagagtctaagaaattgggtataattctggggcctgggacttgctatgcactgcagggatgacacacgaaggtgggaacatggccatagtggctgcatccagcccatcttagaggcaaatgggaaaaatggcaaatgaaaatcaggctgggtacagaggaagagtactaataccaccacaggcctcaccttaggtccctgggccactggggatcctcagagatgctatttgccttattttgaaaagctttatgaaaataaagcactcacctatgcgaaggcaaccaggcttactaatgtgtcattcttaggcaaaagccaagagcgcatatcatgamgtggtgatcggatgctgattcacagttctgtctggaagccatggatagttctaattaattttaaatggggaaatgtattcaatacttattcacaaatgtagcttgagagacaaacaattaaatgtggcctttacagaagaaaataaggaggtccttagtgagtgaaaatttggaaatcactggcttgaaccaaaaagaggtaccttgtgtaagaatacaaaagatggagtagccrgggacagtggttcacacctgtaatcccagcactttgggaggctgagacaggagaatcaattgagcccaagagtttggtactagcctgggcacatggtgaaactctatctctacaaaaaatataaaaattagcagggcgtggtggcacacacctgtaattccagctactggagaggctgaggcaagagggtcacttgagcccaagaggtggaggttacagtgagctgtgatcrtccagcctgggcaacagagtgagactctgtctcaraaaaaaaaagtggagtaataatgtgactgaacattttccakgtctgtcactgaacatttcagtgacagaacattgcagagcttttcacgtgttatctcccttaattttcccagcaaccctatgataaaaaggtaaaatctccatttgatagagaaggaacgtgaggctcagagaaattcaayattgcctgcaacccaaagctagtcaatggcagaactgggaatagacaccaccygtctgactgcagaaactgccctgagaacctccttattctatcctgcttttcaattctgataaagtgaacatatattaaccacttattatgcagtgatcccctttacattctctgaattaaatatctataatgaaaccaccaccaggaactgtgggagatgctgagacggtagaagacatacatgggccctgcactgaaggagctttcaagcatcttgctggggagacacactttcatgggccctgtgcctggagcaataacaagatcatgagacaggccccatgttgaccaccgtgtctccagtacagaacacgtcacccaacacctagaracaattatttaatgaatgaatatacgtgcaatagacaacattcggacgtaaactcagtaagcagaaaaacaaataacatcttcctttggttacataaagcatgagaagaggctgttggaagaagacatgcgactatgtcgtttagaattctctctcctctttcccttgcaccccaggggtatcccaggatctctgcctccatgatcccccttcacctgccacctcctttctttgcctttcaggaacaagatcctgatttttgggctcctggaggagacggcgttggctgcctttctctcttactgcccaggcatgggtgtagccctccgcatgtacccgctcaagtgagtgtctctttcgggcggcctgagtagtcatacggggggccttcagccccctccaggatccaagttctgatcgctttgaatgctcctttatgtgacagccaccaagccaacctctgatgctgctgacactctcctccattgctttcagagtcacctggtggttctgcgccttcccctacagcctcctcatcttcatctatgatgaggtccgaaagctcatcctgcggcggtatcctggtggtaagcccctccacattccccccagcaaagtgcaagccccaccaccagctcctccctccaggaccacacgcagactccactcccactactggttcctgcttctgttcctcaacaccctcagatcctggggtcccaggtcccaggagccctgactctttcgaacctgttgtctctgccctcttcccatcagattctaaaccccgcctaactcacagttggtctccgaggccctccaccttccacctgaaaccacagaacatcagaattagaagggcctttccaggtcacctagtcccacgtccatattttacagatagaggaggctcagaggtgaatctgttcagggtcgtaaagcaaagaatagcaggactggtactagaacccaggcctcctgatccccactcatcaaccgacaagttattgtttttcctacaagcgttttttaatcacttagtagaggttaaaatatgatggcttacaaaccaaatactgtccaggaatactgtttggtttgacctgtgccatattttgtgtgtgtggggggaggagggkggattaattggtccgatatagaaaatttagggtctttcacataaaatctgaattcgacttctcctgaagatcagaagagctgttaatcccatgtccacatctctgcacagcaagaatggacagctgctcccttagactctcgttcgtcacctgaagaggccctgtgggcgtttgcattttcaccctcgacctattctgccccagcctccaatgtgctaaatacaagtctcccctaaaggcaggttcaccctcccttcctttaacctatggccccagctcactggacctccttctcctccctttcaccttcttttttttttttttttttttttttttttttgagacggagtctcgctctgtcgcccaaccaggagtgcagtgcagtggcacgatctcggctcactgcaagctccgcctcctgggttcaagcaattctcttgcctcagcctccagagtagctgggattgcaggcgcatgccactatgcccgactaattttttgtatttttagtacagacagggtttcactgggttagccaggagtcttgatctccgcctgcctcagcctcccagtatgctgggattacaggcatgagccactgcacccagcctccttccaccttcctaagccacttcccccagtgcccttcaccaggcttctccttccacctggcttcagcgacccaagcccctaggaaattgatctcttgcctccttttaagctcatgctgcaatctccactcccaatctctctaacaggctgggtggagaaggagacatactactgaccccattggaagaagaaccaggcatggaaagatggggagctctggaggtgttgtggggatggtgatggagarggatggaaataacgggtggcattgggtggcaacatttggggagagataatgaggcaactcagcaggctaagttgcggggtatataaattggggtgatgaccccatagacctaactgtgaacaatcagattagacactatgtgttagagtccccccgaccagatccttttccatcccactccactatgttgtctattttttctgaggaattaagggttaccccaccctgcccactcccatcccttcaaccccacttcctactgtaatagatcagcatccaaaagcaggaacccatctaaaccagaaggaagccctctcagatcaccccagcctcactccatttcccacttccacccccgttagcttcctgcaggactctatccctggcttccccttcagaccttgcaatcacaaaaggttcttctggtgagtgcaagagcctgagactggaaaaggtggacttgtctcccagtcgaggctggtaagggaccttcagggagagctgggcagacaggtgsgagatggaggtagggctggctggaggaaggaaacaacaaaggaagtgaggtagtgccaatgacaggacatttgacatgagtctccagatagatgtcgtggactccagctctacgtcccacattttagaataccccaccagcagaacaaactcagatctyatcagggtagcagcagaggcaggaccagaaggcaatcaagagcttccagaaatgccacacttgtgtgccacagagttccccgctgacccttggttaggggtcctcttagtccacaaggtccggatgtcactcatgtacttaataacacttcaccttctgtaatactaagtcctcagagctccatgctgttctgaaagggatggccacaagttctttcccagcctcttccattccctttcttttcatgcccatcccgatgaacctgcatcattccccgrcactgccaagccaaccctggaaaaggagttcgctggccattggctagaatcagggtggagaagttccctgaaccttcctgtctcccagggacatgtatgcttccagggacaagcttaggtcatgaacatggtcagaacctttggacaagaggaaaaatactaagagatttgctttttctgggtgcggtggctcatgcctgtaatcccagcactttgggaggccgaggcaggtggatcatgaggtcaggagttcraggcgagcctggccaacatggtgaaaccctgtctctactaaaagtacaaaaaattagccagtcatggtggcacacgcctgtaatctcagctactcaggaggctgaggcaggagaattgcttgaacctgtgaggaagaggttgcagtgagctgagatcgtgccattacactccagcctgggcgaaagggtgagactccatctcaaaaaaaaaaaaaatgatttgcttttgacgtcttaggtggcagggctgttccctccaggcaaatgcccttcaaaccgacgatcattgtgcccacttaccctgggctggagagttggtttcaggttcctacaggagatagctttcttycccttactccctatctaacacttttgctctgcaggcagccttgcccattctctaagcctggcttagaaggcactgggaatgtcctgtagagagagacctagataggtcatgcaagtgagaaagacatctgaggaaaatggaagacctaaggcagacaggaaggaagcacaaaagacaagcattgggtcagacccataaaccacctcccaaaggctgtcatttcattgcactggaattttgctttatcagaagcaaggaagtaagggagtcattgccttgggcctgggaatctaagtgggagacaatattaatttggatccgattaattggagattactaactgtggacaaaagtttatctttgcacaatcaataaaaatggcatttttttagtaaattaagagcataaacaatattgctagaggtggcatgtttagtctaccaaaaacaatacttttcaggcactttagaaatatccttttagaagcagcgagtgcatrggctaattatcatcaatctttatgtatttgttaaagaaacatctacaggatctttattggtgaccttttgtaagacattagtttgaggtactacctatstacttgaaaataataaagtggcatttctttatgaaaaaaaaagaaatctcttccataattcagatttctacactttatacttgcctccctcctaaatcgtgatattgaaatatgtgctgtggcagaactcggcttgtagggaaagcaacaaagagatagcaagtgtcagggatgggagggaaatggtctgggagcagatgatgtccgtggagaaagcaagaggggaagaagttaggttgcaaaataacctacaagaaactatagcaggagcctccttcctcatgctgatcccaccctaagagccacaagagtttgtccaggacagggaggggcctgtgagtctattaagaacaagatcctcaggggcacttctgctttttctgttccagaccaaaatcaggccattctctatctgatgggatgggggaaggagatagtgggttgaggagcccaagagtcaacaccaattcacaatctgtacttcatgcagagctttgtcctgggtgctctctttaaggggtgggggtaaagtggatgcaatccttgaaattcacctgagtagtagacatcagaaaccatcatggacagaatgtaatgagcagtaggggggacgcttgtgtgctggagatggaggggtgggtgggtgggtgtgcattgctccaggggggccctgggaatgggagagagaaagacaccaactcttacaacctatgccaggatttcagaataaaggtcagaagtcaattcttgcccaagccatattgcagcccctttattatgactcttaacagtgtcattaatgacagttatagttagtagtgattataagagccttaatcacagctcattttgtgccataactatgccaaaattttatttgtatagtctccgttcatcccaccacagggcctttattcttgatggtccctctgccaggaacacttttccctagttattcacatgcctggctttgtcacttcattcagatcactccttaaacatcagtaagatcctcacagaggacctcaaataaaatgacttcctggaacctctttctctgttctcttcatttttgttcataaatacttattaccttaaatttagatagaaagacagctagatgtaatatttagaaagatatacatgtattttgttgctgtttatgcttttgtttgtctgactcctccagtataagttccatgaagacagagactctatttcttttgttcaacacctttatccttagcacctaaaacatctgacacacgttagacaattaataaatatgtgttggatgactgaaaggatcctcacagtaattcagtaagatggagactattattatctccaatttacagatgagaaaactggtgctcagaaagttaaattattattcaaagtttcaaaggtagtaagcatctgaagcaggattcaaacctaggccagtctgactccagggcctgccctcttaaccatgccatgctctgcaactgcaagaacagaaagcctatgtgcatggacagagcctgactagcccaatggctcagtgaactggggaggctgccaagggagccaggaatttgtggacaattaacatttgagcagcaggggcaaggcagatccgtgagaaagggagaagatatgatctcaaagatgcggtagggggttaagaaaaagatccaggccaggcacagtggctaacgcctgtaatcccagcactttgagaagccaaggtgggcagatcacttgaggtcaggagttcgagaccatcctggccaacatggtgaaaccctgtcttccactaaaaatacaaaaattagccgggtatacacctgtaatcccagctactcaggaggctgaagtagaagaatggcttgaacccaggaggcagaggctgcagtgagccgagattgtgccactatactccagcctgggtgacagagcaagacttcatctcagaaaaaaaaaaaaaagaaagaaagaaaagaaaagaaagaaagaaaaagatccaaagagatttgatggtctgctagaggattttagcaaaaagaagaatcttactattgaatgtaatctgagaagctaaggccaacttttgacccaggcagaaagtctttccatggcattttctttttatctacagaataggaaatgtgatcatgcatcagagataatcagagatagtcactaaatattcataatgctaagaacgcagcaaaaaataggaagaaagtggttagatcaatatcaaaggaagacatttaatacaaagtgagtctttcaaaaatatccttggctccagtgaattcaatgaaggattttttgcaaattcctcaaagaatttccttatattatttaaaatgtgctggaatataaaaaattattttgtgttttgtgttgcccagcctattttatgagataagtactattttgttaaaattttatatttaatatagataataaattgactaccccaaatggtggaatgcaaggatagcatattacaaggaaaatgttacaaacaactaacattaactagacaaaggatgaaataatcatttcaaaaaaggttgaggaggctatcagtaaaattcagtatctattactgataaaaatgttggaggaaaaagtgtatcagaaaatataatcatgggccagtcgcggtggctcacgcctgtaatcctagcactttgggaggccgaggtaggtgggtcacctgaggtcaggagtttgagaccagcctggccaacgtagtgaaaccttgtctctactaaaaatgcaaaaatttgcgcgtggtggcacgcgcgcctgtaatcccaactactcgggtggctgaggaaggagaatcacttgaacccggaaggcataggttgcaatgagctgagatcccgccattgcacctccagtctggggtacaagagtgaaactcggtctcaaaaaaaaagaaaatgtaatcatgttcagagaagagaggaaaggatgtagtaagtctagaaaaccaataacagcaactataacaaataattgcaataaaacatttgaaatcctcgataagcagtttgtgtttaaaagttctacaaaggccgagcgcggtggctcacgtctgtaatcccagcactttgggaagctgaggtgggcggatctcttgaggtcaggagtttgagaccagcctggccaacatggtgaaaccccgtctctactaaaaatacaaaaaaaaaattagccaggcatggtggcgggtgcctgtaatcccagctacttgagatgctgaggtttgagaatcacttgaatccaggaggcagaggttgcaatgaaccgagatggtgccacagcaccccagcctgggcaacagagactccatctcaaaaaaaaaaagttctaaataagccaggtgctatggttcacgtctacaaccccagcactttgggaagctgacgcaggaggattgcttgagcccaggaatttgagaccagcctgggcaacacagtgagacctcatctctattaaaaaaaaaaaaaaaaaaattagcctggggtggtggcccacacctatggtcccagtcacttgggaggctgagggaggaggatcgcttgagtctgagaggttgaagctgcaatgagccatggttggaccactgcactccagcctgggtaacagagcaagactctgtttcaaaaaataaaaataaataaataaaaattctaaataaataaaactttgtttttagcgagcataactccctaaaaatccaagaaattcagccaaaacaaagcaacagcatcaataacaaaaaaaatcctagaagcaataaattcaaagttacagggtatatgggtatcagttttcaaagaagcaaatgtatccctaaatattagggagacagaaaatacagcataaagagcttctatttacaatagaatgaaaacaaattacgctcaaggtttactgtgtgcagcacatagtaactattaaagaaaatttaaaagtacaatgagaaaaataaaaaaacatgaattcatggaaagctaaacttgactgccatttgggaaggcagaacgtagtaaagataaaaataagttactatgaaagagtcaattcaatatcaattaaaatcctcgctgcatttttataaaacatgacatattggttgtgacattcagctgcaagagtaatcaggcaagaatctcagaggttttttctaagtaattatgaagcaaatgaatagatcactgatgctaacatatttaccccaacagattttaaaacacatcagaccactggccgggcgcggtggctcacgcctgtaatcccagcactttgggaggccaaggtcggcagatcaagaggtcgggagttcaagaccagcctggccaacatagtgaaaccctgtctttactaaaaatacaaaaattagccagacatggtggcgcatgtctgtagtcccagctactcaggaggctgaggcaggagaatcgcttgaacccggtaggtggaggttgcagtgagctgagattgcaccactgcactccagtttgggcaacagagtgagacttcatctcaaaaaaaaaaaaaaaatcagaccaaagtggcaattatcaaaaccttgtagcattaagataaaacctgaaaactcattagtcattcaacatctattcagggactatttgtggaccagctgccctgtgccaagcactatcctaggagccaggtatatagctgtggaaaaaaacagggaaggtccctagggtcatggagaaccagacaagtcaacaagacaagtcaatcagacaagtcaacagttaacaggcaggataatttcagagggagagaagtgttgtgaagatcaaaagtgatagagagagggctggcgccggaggggctgttttggatttaactatgagagaaggcctctccgaagaggtggacttttgagctaagatctctagaacaaaatgaggtttctaaaaataatttcaattgattgtatctccataaagttgcttttgggcaatgcccatctgcaagactgagctaagtgttattgtcacatagatgatgcatagaaaaacatatgaattttaactttaattctaaccttcttcttaagaattttatgttcatctacattaaacacaaagactgggagaaaacatttgtgttatatatgacaagggtttcctacaaatcaatataaaaaagaaaacaatggaaaattgggcaaattgtaagaatgacaatttacaaaataaataaataaagtccaagaccaggcatggtggctcatgcctgtaatcccagcactttgggatgcccaggcgggcggatcacccaaggtcaggagttcaagatcagcctggccaacatggcaaaaccccatctctactaaaaaatacaaaaaaatcagctgggtatggtggcgtgtgcctgtagtctcagctacttagaaggctgaggcacgagaatcgcttgaacamaggtggtggaggttgcagtgagctgagattgcaccgctgcactccagcctgtcaaaagaaagaaagagagaaagaaaggaaggaagaaaggaaagagagaaagaaagaaaagaagaaatgaaagaaagaaagaaaaccagaaagccagtaaacataagagaaaatgctcacattgacaatttaaaaatgcaaattaaaactacaagatatcaaagttcactgattataatagtaaaaatcaaggtcatctagcataatcaaaggtgtggaaggcagacattcttgcatcctgttgttgggatgcagatagataaacacttttaaagaccaattggcagaatcttttaagattgttaatgagtgtactctatgattcagcaacaggaactgattctacagaaatagaagctcaagggcctgatgatatctatgtgcaagaatgacactctagcaattttattaatggttaaaaaaatggaaaatatctcataaatccatcagtaatgggaatgattgaatagagcatggtcaatacagaatatggaagcctcacagcactgaaaaaaagaagctttatgtacatgacaggttggtagagagttgaatgattgtttaaaagttgaaaaatacctccttttaga

SEQ ID NO: 95906 - DNA, 28290 bp, Homo sapiens
  misc_feature (1)...(28290): n = A,T,C or G
cctgagactgcaagaccaacccttccttttccgcctcctcctgagccttctcagcatgaagacaacaaacatggaaaacatgatgatccacttccacttaatgaatagtaaatgtatttcatcttccccgtgatttccttaataacattttcttttctccagcttactttaagaatacagtatataatctctataacatacaaaatatatgtcaatcaactttctgttctcagtaaggcttctgttcaacagtaggctattagtagttaagttctgggggagtgaaaagttatctgtggattttcaactgagcacgggggtcaatgcccctaacccctgcattgttcaagcatcaactgtagatgatctcaaagctcccttccagttctgagattaaggggggctaatttgaatgtcctgggacagccacattttagaacacttctatcattggatattttctgcttaaggaaaacaacttatatgtgcacatctcactttgcaggaatcaaagtcttccaggtaaaaccccgcatgaagtagacagggcagagattctcaccagttttttttttttttttttttttttttgagatgcagtttcattcttgttgcccaagcgtgagtgaaatggtgcaatcttggctcgctgcaacctccacctcccaggttcaggcgattctcctgcctcagcctcccaagtagctaggactacaggtaggcgcccccaggactggctaatttttttgtatttttagtagaaacagggtttcaccatgttggccaggctggtctcaaactcttgacctcagatgatctgcccgccttggcctcccaaaatgctgggattacaggtgtgagccactgcgtccggccttctcaccctcatttttaacatgaagaacttaaggcccaracagacgtggcagttaataagcaggaagtcagtagttctgggtttaagttccatcttagagagtgtgtgaccttgggccagtagtcacctagcctcagtttctttacctataaaatggagacaaggctgggtacagtggctcatgcctgtaatcccagcactttgggaggccaaggcaggaggatcaattgagtccaggggtttgagaacagcctgagcaacacggtgaaactctgtgcctacaaaaatacaaaaattagccaggcatggtgggacatgcctgtagtcccagctacttgggggactgagctgtaaggatcgcttaagcctgtgaggttgaggctgtggagagtagtgatcatgtcactgcactccagcctgggtgacagagtaagattctgtttcaaaaaaaaaaaaaaaaaaatctggtaacaataaaagaacctattttaggaagttagagagaaaattaagcaagcattattgaatggatcaattatgatactgcatgtcaagcacttagcacaaacctatgttatggaataaatgtttgtgtccctcaaaattcacatgttgaagctgtaacctccagtgtggttgtatttggacatggggcctctaaagagtaattaagattaaatgaagtcatcagggtggggccccgatcggacagaattcatgtccatgtgagaagcgacactggagagctcactttctctaatacccacattgcctgcacaagcacctgaggaaaggccatgtgaggacatagcaagaaggcagccgtccacaagctgggaagagagccctcatcagaaatcaaatcagttagaatcttaatcttggacttccagcctccagaactgtgagaaaataaaacctgttgttaaagccatttggcctgtggtattttgtgatggcagcccaagctgctgatacatccttgcacatccaatatacattagttattgttgttatctgttgttaactgttacttctcatgtccaaagtcccacaacaaggaagtcagtgagtggttgagccccactgaggaagcaggtccttcactcatcaggccaccttcctgctcttgtggcaagaatacccccagctcccctcctgggactccctgactccttgattgcctctatccatccctccacctcaaccacaagggcagggctcatggtacaggaggggtgtgtgtgtgtgtgtgtgtgtgagactaacccagaggaagggggggtgtggggtaagcacgaggatcaaaagaagcaggaaattctcttctgtctctggttcctgggaacttcttctttttttttgcctgctcttgttgcccaggctggagtgcaatggctcgatctcagctcactgcaacctccacctcccaggttcaagtgattctcctgcctcagcctcccgagtagctgggatcacatgcatgcaccaccacacctggctaattttgtatttttagtagagacaggggtttctccatattggtcaggctggtctcgaactccccacctcagatgatctgcctgccttggcctcccaaagtgctgggattataggcacgagccaccgcacctggcccaggaacttctttaagctctaggaagatggggagagctggggtagttctgagattaaccgtccctactccaaataggaacaagcccaaggaatgggcatggaaagaaatcaactgatccttcctgatccaagttcttcctttgaagatgcactgaaggttcttggagacatttgaaaaatctgaacctcttgcccagaactctagaggcattataaatagataacgtactttcacacctacaaggtgtctgctcacatacaccatctcattttatcctcataagagactggcaagccttacagctggcagagctcagtcttggaagagacatacctcatatgtgcacgtcacttaagaggcctttctcctaccaccttttgtcatcacacagatgtgtgtctcttcctctcaatggtgaagacgagccagcctaaccaatcaatgcctgaatcccatcgagtaccccatacagggccttgtataagtaggtgctcaataaattttgtagatggatgaataaatgccagtgaccagatcagggagaagtaaaacagggtctcctactggagaagatagtgttgctgttgttctaagggagcaagctcaggcatctgttcctacagcctggtacattcactctgaggcaggcacctgacatcattttaatatttattatgttatcattatcataactgtcacttattgtccaccattcaaagttaagttctttgcaaatatcaactcattgtttctcacatccactgttatgagctccatttaacagatgaggaaatggaggcacagacaggttaagtaatgtgcccaaggttatttagccaaaaatagtggagctgggattcaaacctgattgtttatatcctggaattacaattttcttgttttgctttttgagacagagtttcgctcttgtcgcccaggctggagtgcaatggcccggtctcggctcactgcaacctctgcctcccaggttcaagtgattctcctgcctcagcctccccagtagctgggattacaggcgcacgccattacacctggctaatttttgtgtttttagtagagacgaggtatcgccatgttagccaggctggtctcgaactcctgacctcaggtaatccgcctgccttggcctcccagagtgctgggattataggcatgagccaccatgccaggcctcggacttagaattttcttttctttttttctttgagcggagtcttgctctgtcccccaggctggagtgcaatggcgtgatcttggctcactgcaacctctgcctcctgggttcaagcgattctcctgcctcagcctcctgactagctgagattacaggcacccaccaccatgcccggctaatttttgtatttttagtagagacgaggtttcaccatattggtcaggctggtctcgaactcctgatctcaggtgatccgcctgcctcggcctcccaaagtgctgggattacacgcgtgagccactgcgcccggcgacttacaatattctaagttcctccacttccctcagcttagcctcacaatggtcctggcaagcagataggagtttccgccgaccacccaaggccataactgcacatgggggcagatgtggaactagaacccaggtctccctggggcttgttctgacacacaaaggtctgcattgtgaaaggacatgaaaggcacaccagtgggctgccccactgtgtggggacttaggacccagctatatccatgactgttaattcacctcgggatgcagcgttcctgtaagaaaagaaaaggagagctacgatacgtggacagaggcttttgctccagtttccatagacactgccccgtttgctcatgctgttccctcttgttagaacatcttcatcccacgctcttacttctcgctgactcatcatgtttcacaatacacttggatttttctctcttccgggaaacctctgcccctccctgaagagggataaagtgaccctcctcatactcccagagtaccaggtgattctctatagcattatcattaaaaatcaggggctgcattctctccctctgtcccagtagtctgggaactaactcctcaggagcagggactcccctttctcatcctggtgtttcctattggcaatgcctgccactcagtagtaggcgcttgttgactgagactattgatcacaggcaggttcgaatgtctttgttccctcatctctacccctgttaagggattacggagtgtcctattcatttcgggcatatagaaaatgctgttaaagttcattgaattgaatgaaacaattaatcgttctgcaaaatctgagcagagaagtcatttggtttcaaaatacttggataaaaacattacggtggctcacgcctgtaattccaacactttgggaggccgaggcgggtggattacttgaaaccaggagctcgagaccctgactctactaaaaatacaaaaatgagccggtcgtggtggcgcgcgcctgtaaatctcagctactcaggaggctgaggcacgagaacagcttgaaccgggaggcggaggttgcagtgagccgatatcgccactgaactccagtcagggcgacagtgaaactctgtcagaaaaacaagaaacaaaaaaactgtgaggtactgagatcacaaactggtgctcaaaatatactgatttcctttctcgtctggactaaacgggggtagggaagggtgagaaggaggggatcggccctcccaacaagtctcatcttccccagatgctgcttggtgctcaggggctgcaagtactctgtccttgcacagagggttggggactccagctgtgcatgggggcacacattaggcccacagcttgtaatggaccagtagtaaagtaagggaggggaagcagactctctcttggaaaggaggctcctgagtccttcttggggcttcccccaccaactgtttcccaaaccagcatacagtaggcacttagtaaatactaaacctagtaaaggactgaatgatggtagaccgaacccccaaagcaaaagagaaagggtccaacagcgcctccttgcggtgctctgccccaagccacggggagaaacgttgcagcccgcgccgaacgccgggcagcacaaaggatccccgactgccggggagcggtgctcggagggcacaggtctacgccatcccycacgcagtttcggagatggagcgctgggcccatgkagggaaggcggcaggctcggcggctccggcagcttgctggggcaggggctcaaggcggcagtccgatagtggaggccgctgagaactgtcacggagctgcgtctgtacagcgagcatcccttatttattcagggcgagtgtgtatttggggcggcgtgcagggggctgacaaagaccggagagctcccggtgcggccgccggcggagcgaagactggaacccgtatgagcgccccccagcgcccctgagcgctcgccgccggtgcacggcrcaccccgsgggaggcagggwtcmgcaaagccgtgcgccccgaggcccgcccccgtctccgcacaaagaccgtgagtcccgggtccgagccttccgcgcggggatcgggcggttgtccggcgggtcgtccttcgacggcctcctggcctcgccggagcgggtgcggggaggcccacgcagcgacggctggaggaggggtgggcggggctgccgggggtgkggtccccggggcggggcggggcgcgctgtgtcgcgggtcggagctcggtcctgctggaggccacgggtgccacacactcggtcccgacatgatggcgagcatgcgagtggtgaaggtaaccgcgtataggatgacccctttctcttggctcccctcgcctcccgcattccctcctccctccatcccctccgcggctctccgagcacatttatttatttgtctgggcaccagggctggctgaatccctgtcctccccgccctctactcagaggaggactggcctgcaagagtggccagagctggggttttgggggtttggaggcctctgcttgagccgttcgcgtggtgaagatgagccggctcccccaaaactggtttcaatttcgcttttcctgcctgaaacttgtgataacaactgggtgcatctccagtgcaggaaaagtccttggcatcttggtgccaggcattctgctactgctggtggtgggttatgaacacagatgaccaggatgaagtccttgccttggaataagcccatagcccatcccataatttgatgcctgtattactagagtcctgagaaacacggaatgctgattagaatttgggacaaagttccctgagtattctctggaggaaaagatgcggaggtggacctggaaggyctcctggagtaggtggcttgcgttcgtgagttctacaagtgttgaatgcctacatgtgctggccctgttctaggagkggsgggggggcgggcagagatgaacacaaatccggcccttgttgaattttgttcctatcagggacacaatttgaaataagatctggaaggatggggagggggcagtttcctccagaaggtgggaaaacccagggtgtttggagatggattagggaggaaggtgatcctggtgaagtgagtctggcaccccaagtctttcagaagtgccccttccagtctgcagggtggaggggcaggctctaggaagagggtgcctgctaccctcagcctctgagaagaaaatggcctcagactgggatgcccagagcaggcttggcctagatactaaatctggaggttggcagcaaaatgaggcagagggtctttccagccaagtggaagagagatgggagccagaatttattgcattggaaccattacatgccaaacggtttacatggttatttcatctaattcgcacagcagttctgtgagataagtaatatatacccgcattttacaaatgaggaaattgaggcacagaggaaataacttgcttgtccagagtctttcagtaaggagcaatgggactggaatatgaaaccaggtccacaggcctccagcctgcaggctctcttaatggcctttctactttcattttctgttcctctgagtcaggtgatttcctagtaggcagtaggaaagaactgtgtgttttaggttgggtttcaacttcctcaggctttgggaaagttctggcagaactcatcctaaacagataaagttcaagtgtctttatctttccaagacctggaaaatgtctattccagatcttctccggtcagccctgggctttgttcttgccaaagagtcacagatgatagagaaactcttacaagtgcagatgcttctagtttggggtaaagataaatgaagggccattgaccctgggtggaaggcaccagaagcagcttattggttgaacagaaatagaacataggctgagggataggaggggggcatgggatgtgtttatattatatgttgggggtgggggtaaggcagagaaagttcaaatggtccacagtgttaaaggacccctccccacttgtggactgggtttggagagcttcagtttctcaacctcatcactactgacattttgggtcacataactgttatgtatccattgtatgtttttagatttgaggttactacaaggtttgtaaataatatcttataacctgttattttaaactgatgacaagttaacactgattacataaacaaacaagcaaaatgaaaactaatgaaggccaggcgtggtgtcccactcctgtaatatcagcactttgggaggctgaggttcgcggactgcttgagcctaggagttcgagaccagcctgggtaacacagccaaaccccatctctacaaaaagtaccaaaattagccgggcatggtagcacactgctgtagtcctagctacttgggaggctgaggtagcaagatcacctgagcccaggaggttgaggctgcagtgagctgtgattgtgccactggactccaatctgggtgacagagtgrgacattgtctcaaaaaaaaaaaaaaaaaaaaaaaaaacaactaatacaaactgtatactttaacttcgtctttccgcttactaactttttgttgtttctatttctttccttctttctttctctctccctttctttccttccttccttccttaagatggagtttcactcttgttgcccaggctggagtgcaatggtgccatctcagctcaccgcaacctccgcctcccaggctcaagtgattctcctgcctcagcctcctgagtagctgggattacaggcaggcaccatcacgcctggctaattttgtatttttagtagagacggggtttctccatgttggtcaggctagtctcgaactcctgacctcaggtgatccacccacctcagcctcccaaagtgctgggattacatgagccactgtgcccggccatttctatttctttcttattgtactgtctacctcttgaaaaattgttgtagttattatatttaattggtcatcttttcctctttctacttaagatatgagtagtgtatataccataaatacagtgttatactaatctgtgtttttctttctttttttttttgagacggagtttcgctcttgttgcccaggctggagtgcaatggcacgatctcagctcactgcaacctccgcctcgtgggttcaagtgattctcttacctcagcctcccgagtagctggggttacaggcacccgccaccacgcccagctaatttttgtatttttagtagagatgtggtttcaccatgttagccaggctggtctcraactcctgacctcaggtgatccaccggctttggcctcccacagtgctgggattacaggcgtgagccaccatgcccagcccagatgattttttattgctcattaaaatttttttaaatttctgattgaagaactcctttttagcatttcttgtaggacaggtctggtgtcgatggtatctctcagcttttgtttgtctgggaaagtctttatttctccttcatgtttgaaggatattttcactggatatactattctagggtaaaagattttttccctcagccgtatttcatttaaatatgtcatgccactctctcttggcctgtaagatttccactgaaaagtcgctgctggacatattggagctccattgtatgttatgtgtttattttctcttgctgctgttaggaccctttctttaatccctgacatctgggagattgattattaaatgccttgaggtagtcttctttgggttaagtctgcttggtgttctataaccttctcatgtttggatattgatatctttctctagatttgggaaattctctgctactatccgtttgaataaactttctagccctgtctctctccctacctcctatttaaggccagtaactcttakatttgcccttttgaggccattgtctagatcctgtaggcatacttcattctttgtttattctttttttttatttttgagacggagtctcgctctgttgcccaggatggagtgcmgtggcacaatcttggctcactgcaagctctgcctcctgggytcataccattctcctgcctcaacctcctgagtagctgggactacaggcgcccaccaccacgcccggctaattttttttttttttttgtatttttagtagagatgaggtttcaccgtgttagccaggatggtctcgatctcctgatctcgtgatccacctgcctcggcctcccaaagtctttgtttattcttttattattttgcttcatctgactgtattttcaaataccctgtctttaaacactctagttcttctgcttgatcaattctgctgttaaaagactgatgcgtttcagtatgttaattgcatttttttctttctttctttttttttttttttgagacagagttccactcttgttgcccaggctggagtgcaatggcatgctctcggctcactgcaacctctgcctctccaattctcctgcctgagcctcccaagtagctgggattacaggcctgcaccaccatgcccagctaatttttgtatttttagtagaaacagggcctcaccacgttggccaggcyggtcttgcactcctaacctcaggtgatctgactgcctcggcctcccaaagtgctgggattacaggcatgagccactgcacccggcctcaattgcatttttcgactccggaatttctscttgattctttttaattatttcaatttatttgttaaatttgttgatgggattctgaattccttctctgtggaggaaatattgaatttctttgagtttcctcaaaacagctattttgatttctctgtctgaaaggtcacatatctctgtttctctggaattggccctgtgtgccttatttagttygtttggtgaggctgtgttttcctggatcgtcttgaagcttgtggatgtttgttggtgtctgggcactaaggagttaggtatttattatagtctttgtagtctgggcttgtttgtactcatccttcttgggaaggctttcgaggtattggaaggggcttggctgttgtgatctaagttttggtcactgcagccrtgtctacataagggggcactccaagcctagtwacactgtagttcttgcagacttttagaggttactacctttgtggttttggataacatcaggaagaattctctggattaccaggtagagactctcattttcttcccttactttctcccaaacaaatggagtcttactctccgtgctgagctccctggagctgggtgaggtgtgacacaagcatccccatggtcaccagaattgggactgcactgggtcaggcctgaagccagcacaagactgggttttgctcaaggcccgctgtaatcactacctggctatgccctacgttcgctcaaggccctagggctctgcaatcagcaggtggtgaagccagccaggcttgtgttcttccccttagggtggttagttcactgctgggccccagagaggtccacagttgctgtccatgggccagggcctggagtcggaaaccttagaaatctctctagtgctctgtgctactgcagctaagctggcactgaaaccacaggacacagtccttcccactcttccctcccttttccccagatataggagtctctccccttgtccaccaccaccacgggtctatgaggagtactgccagggtactactgctgatgttcgcctaaggcccaaaggcccttcagtcagcttgtggtgaatgtgaccaggcctgagactcaccctgcagggcagcggtctcccctcttgttcggccagataattctttgttaggatgtttatcagcatctctggcctctatccactctcccgatttatgacaacggaacaatgttcccagatattaccgaatgtccctggctgggtaaaatcgcccctggttgagaaccactgktttgtaccaattcattgttccagagaaatgtgacctgcccttgagtgtctttatcttccccaacaagaaaaggcctgtagtcccacaagatggactctaaaagaggggcagcattcctttgtcaaatacatttgagaagtactgcatgctgtgggcccacagcttggtcaatcaccatacacaatagcatattaaaggctgtgggaagttctccagtgaagaaacctctttagccgagatttaccaaatgtacttgaccttggaacccttttcctgtactacctattaaccttctgcaggacatactgtacttatgtttcccatctgggccctctgccctggtgcttctccccttctctgctttatggattcctgttcattctgcatggcccagctcacagagtgcaccctctgtgaaaccttccttctcccctctcatctccttccttaccgtatatccatacacattcacataatcacatccatgtttcgtccattactctattgaaattcttgaggactgggtcctgtctcagttaaatgtcagtagaagatgctcagtaatggctgttgggagaattcagaagggatattcaggtgtttgggccacagttttgggaagatgagtcactccttgcccccttgtttccccacttggtgtgtagagttcttctctgctatggtcttcsggagtcatttcccttctccagccctgatctggcagagtttgaagcggtggggtcatgtctttgctgcagatgctcagtcgatgcttacggaaggaagaaaggaagagaggaagggaattagaacctagtgactttctaggaagaaggctagagagcagaggttaagtaccctgctttcaggagaaaagcctcctaagagcacttactcccaagttttaatatctgggagaagtgatctatttttccctgcacctagtacctaggtgtaccagagttgtggtgaggccacagtcagaaaattcacttaaagcaccagcaccggctgggcgcggtagctcacgtctgtaatcccagcactttgggaggctgaggcgggcggatcacgaggtcaggagatcaagaccatcctggataacacggtgaaaccccgtctctactaaaaatacaaaaaattagcggggcgtggtggcgggcgtctgtagtcccagctactcgggaggctgaggcaggagaatggcgtgaacccaggaggcggagcttgcarggagccgagattgygccactgcattccagcctgggcaacagagcgagactctgtctcaaaaaaaaaaaaaaagaaaaaagaaaaagcaccagcaccatgcctgatacatactaagtgctcagtaaatgtaggctctgactttaccggcttctgcccctaagatggccagttttgaacttggggcagcttgctgctggggcagggggagggggctgaaataaggaggactaggccaactgcccactcacttgtgtcccctgcaggagctggaggatcttcagaagaagcctcccccatacctgcggaacctgtccagcgatgatgccaatgtcctggtgtggcacrctctcctcctacccgtgagtatccatggggaccatggctttggattggggccaaattaggccagggacatggkcagggagggttaggactaggcaagaattttccctgcttgagatccttttactggaggttatcattgctggagggggcttctctctgaattgattgcttctgagatccagatacttctgaggttcaccttctgataaagatgccaaaggacttttgacttagtaggagaccccttccttaaaccrgtagccaccaagcccaccacagaacttcaggagacaaacagcatcaaaaagaagaagaaataaagatttcttggacctttgtcaaggggtagggataaacttccaggctctcacagttggkagaatttgctcccgcaaacctaaattgtattttgtttttctgtagtcttatttcagaaaattgttacatatgaaaacacaaatagctcatttctactgttcttatttttctctgtttattatttggtattttcttgataaagtctctctgaaagcagtattccaaaatagttttcagagtgcaagatctctctttttttcatccgattattagtgactaaagatactttgagaaattaatctacacttttcattacttggaaataaaatttaagacattgaactttttgttagtcaaagctctttggaatatcaaaggaacaattcatcttatcatttaggayttggacttgtttttttttttgagacagagtcttactgtgtcacccaggctggagtgcagtgatgcgatgttcgtttcctgcaacctccactctggggttcaagcgattctcctgcctcagcctcctgagtagctgtgactacaggcacgtgccactatgcctggctaatttttgtrtttttagtggagacaggattttgctatgttggccaggctggtctcaaactcctggcctcaagtgatctgcccacctcggcctcctaaagtgctgggattacaggtggagccaccacacccggcaggatttactttttattgacaatgcagtggcctaggttgtgtcgtcttctctttaaactgacctatagtccagaaaagtagagaaaggcctgagtcaggtcaacatgggaacctctgtcaagtcccttgggttactgtgttgaaacgatccacttacctggcttagagtgaggacacctgttctaggcctcaggtgccgggagaagatgctcaaaggagctccagggactgattatatctccaaggagaccaactttgagatgatgaaagcaggggtgataggaaaacctaggaaaggtctcgtttggcagagtactatgaaatcagaggacctcaatagttggcaagaccaaggtggttaagtgcgccccaggaactggccacagaccttccagccatataggagtcctgaagaaacatgatacttgggaggaatcccagagctggaggaccaaagcttgatgtaagtcatcagctaagggggcctgaaggtgcctggtgaggccataaaggaggggatggttgactggcagaggaaggagaaccaggaaaggtcttttggaatagcacacaaattcctcctcaaaggctcagtctcagtttatgtgttcaccaaagtggccccacttgtcacatcttggtcatggaaggattcagctcgatgagtctttcgaagctaatagtaaaattctcattccttgagagtttcctgtggaccaagtgctgttttaagcacacgacatatgaggtcatattgaatcctctcaaccatccagtgaggaaggttgtcttcctcttaaaattgcagagatggaaaccaaggaggttaagtaactggtctggggtcactcagaataaggtggcaggagtggaattcagcggactccagggtcttctcttttaaccactccatgaaaaatgaatagttttcaaaattttttaaaaagtagcaggccgggcacggtggcttacacctgtaatcccagcactttgagaggctgaggtgggtggatcactggaggtcagaagtttgagaccagcctggccaacatggtgaaaccctgtctctagtaaaaatacaaaaattagctgggcatggttgtgggcacctataatcccagctactcaggaggctgaggcacgagaatcacttgaacccgggagttggaggttgtagtgagctgagattgggccatcgcactccagcctggatgacaagagcaaaactctgtctcaaaaaaacaaaacaaaataaagtagcaaaatcctttatttaacctagaacttagaaggtagtgggactttctcaactgactgtaagatacagcatggaatcctctggtccagcttctccattttacagacgaggaaactgatcctcagagaaagctcagtcatacagcaagcccgaggcagagctgggacaggtccccggagctctcagctccatgactctgctacctccttcctctgttaagtcctacgaagcccagaaagaagccccttcaggcaggacacactgatacccctgtcttagtccattagtgttgctktaaaggaatacccgaggctgagtaatatataaagaaaagaggttaatttggctcaagcttctgcaggctgtacaagaagcatggcgctgggcatggtggctcacgtctataatcccatgtctttgggaggccgaggagggcggatcacctgaggtcagaagttcaagaccagcctgaccaacatggagaaaccctgtctctaccaaaaatacaaaattagctgggtgtggtggtgcatgcctataatcccaactagttgggaggctgaggcaggagaatcgcttgaacctaggaggcagaggttgcggtgagccgagatcacgccattgcactccagcctgggcagcaaagtgaaactccatctcaaaaaaaaaaaaaaaaaagaagcatggcaccagcatctccttctgatgaggcctcaggaagcttccactcatggtggaaggcaaaggggagccacgtgtacagatcacatgcaagagaagaagtgaaagagagagagagcgagcaggtgccaggatcttctaaacaaccagctttttcagtaagtaatagagtaagaactctcttatgactgtgaggttggcacggagccattccacggagccattcgtgggaggtctgcccccaggacccatacgcctcctggtaggccccacctccaacattggggatcaaattcttttcttttctttccttttttttttttttggtgacagagtctcactctggagtgcagagcaagactcactgcaacctctgcctcctggattcaagcaattctcatgcctcagcctcctgagtagctgggactacaggcacaygctaccacgcccagctacctttttgtattttagtggaggcggggtttyatcatgttgcccaggctgatctcaaactcctgagcccaggcaatccatctgcctcagcctcccaaagtgctaggattacaggcgcgagccaccgccacgtaggtcttggggatcaaatttcaacctgagatttgaggagacaaaacatccaaccacagcaccctcccatcctgctctgaggcctcagctgtkggccttctctgactgataggcacagccttytctccttactgagaccataaaaaatgagatattttctttatcttcctacttttttttactccatctctctttttttttttttttttttttttgagacggagttttgctcttgttgcccaggctggagtgcaagggtgtgatctctgctcaccacaacgtcagcctcccaggttcaacttctgcctctcggttcttgcctcagcctcccgtgtagcggatattacaggcatgcaccaccacacccggctaattttgcatttttaayagagacagggtttctccatgttggtcaggtttgtcttgaactcccgacctcaggggatctgcccactttggactcccaaagtgctgggattacaaacgtgagccatcgtgcccggcctagttagatcacatggctagtgagtgtcagagccgaatcacacccaggcagggtggctccaagtgctgggattacaaacgtgaggcaccgcacctgacctagttagatcacatggctagtgagtgtcagagttgaatcacacccaggcagggtggctccggagtctgtgtgacccccatactctgttgcacaggctaatgcatgtcaaacccttagcacaggacagcacagacaggtgctcagaaaagtgttcaggtggctcaaagtctagagggtcttctgctggctccttgcagctcccaacccctaggtcactccagcccctgagtttgtttgtttttaatcatagtaaaatacacataacaaaatttactatcttaaccatttttaagtatatagttcagtgtcattaaataggattaaataggattacagctgggcatggtggctcacgctcgtaatcccagtaatctggaggccagagcaaaaggattgctcaagtccaggagttcaagaccagccctggcacagtgagaccctatcaaaaaaatttttttaattagccagatatggtggtgggcccctgtagtaccagctactcaggaggctgaggtgggaggatcacttgagcccagaagtttgagattacagtgagcaatgataatgccagtgcactccagcctgggtgacagagcgagaccctgcttcagtaaacaaacaaacacacattgttgcacaaccatcaccaccgttcatctctagaactttttgtctacctgtactgaaactctgtaccccttcagtaactccccattcctttctttccccagcacctsrtgaccacttttgtattttgtttctatgaatttgactattctgggtactgcacataagtggtatcttgcaaatctgtcctttttttgtctagcttatttcctgtagcatagtgtcttcaaggttcatccgtgttgtagcatatatcagaatttcattccttttaaggctaaataatactccattgtgtgtatatgccacgttttgttgattgatccattgatagacacttggtttgctttcaccttttggctgctagaaacattggtatacaaatacctgtttgctttcagttctttgggtgtctacccagaagtagaactgctggatcatatggtaattctgtgtctaatcttttgagaaatggccatactgttttccatcacagctgcaccattttattttcctaagctcctgagttcttaggatttcctcattttctccatttcctcacccccattctaatgttttaagaaaggatgttccatccttttcttccataatctcagaaagtcttgaaagctgagatggtccttagagctcatctagtccatctttatccacttttcaaatgaggaaactgaggcctagaggtgggaagtggctcacccgtggtcacacagcaaaagccaggatcagacttctctgcctcccaggccagtgccctttggtgatttcacattttcactaatccatgactcaattgtcaaatgaatgcaggtgctgtgtgtgtcctggctcatgattcctcctgggagtgaagcagaggatgcctaggaccctcggattggggcaggaagggaggaaaaccagactggagcttgaccccttttctctctgcacaggaccaacctccctaccacctgaaagccttcaacctgcgcatcagcttcccgccrgagtatccgttcaagcctcccatgatcaaattcacaaccaagatctaccaccccaacgtggacgagaacggacagatttgcctgcccatcatcagcagtgagaactggaagccttgcaccaagacttgccaaggtggggttgggctttgcttggaggagggactgatactgggtagagattactggagagggggttcacagcttattctgagcttgaaaagccccaaagagnggagataaaaattgtgagtcttggctgaacttactatgagatagaagggatgcttcctggacagactgacctcctcctgcctctcttcttatacctgtgcagttgtgacagaggaacgttgctgcggttcatgggagaggcagcttggctgcacagggaagggctcgggaaaagaaagcccgctgttccctctgtggactttgggcaagttttcgttcctttctgggactcggtgtcctaaatgacagtggagggaactggcctcataatgataatacctgtcacttgacygagcactttcggcactgtgctaaaaacatcacctgccgacttcatttttatttccccaacaagcccgtgaggtagtgttgtttagtagacccggacatctgaggcatgtgagaggtgaagtggttgcctaaggtcatacagatgacaaacggcagcacttggctgactcgcaagccacatgtggctgttgcaactgargaactcaattctttttcttttttaagacagagtctcgctctgtcgcctaggctggagtgcagtggcgcgatcttggctcactgcaacctccacctcccaggttcaagcgattctccggcctcagcttcttgaatagctggaattacaggcgtatgacaccacacccagctattttgtatttttaatagagaggggttttgccatgttagccaggctggtctcgaactcctgacctcaggcgatccgcctgcctccgcctcccagagtgctgggattacaggtgtgagtcactgcgcctggccagaactcaattcttaattgtacttaattttaatcctttttgttttttctactgagacacggtctgtctctattgcccaggcagttagttcagtggcgcaatcttggctcactgcaacctccacctcctgggctcaagccatcctcccacctcagcctcccgagtaactgggactacagragcatgccactatacctggctaatttttgcatgctttgtagataccaggttttgccatattgcccaggctggtctcaaactcgtgagttcaagccatccacccatcttggcctcccaaagtggtgggattacaggcgtgagccaccgtgcccagcctgattttaattcatttaaatttagatgcctgcatgtggctaatggctaccatattgaacaacacagctctagagcctgtggctgaatcagtgtgcaatcctccacctggaccagctcaggagtttttaactcaggaaatgaaagtccttaggttggtgggagtgggagcagggagaggagtggtccttggatgagcttcagggggtctgggaactgtctgttttgcatgtggatgtgcacatctgtctcgggagatgggctgctgccttcactaggttcccaaaggcatctgtgaaagatgaagagccagggggcagtggtggttttcagtcttyagccttagacctcttttgcccaaggaaaagtttatttggactaccaatataatggaggaaaacagagcagtttttgttgaaatggggataagacccagaaacctcacttatctcagtggcccctgtgatgaggagcttctctgaagccatggaatgtagttgtttgaaaaccactgatgtaatcagtcaaggccttgggtgtcaccagccaagaatgagcggggcgtttgatctggtcgtagagtaatcctaagcgatrtaacctttcccccaaggagtgagtgtggagtgtcagracattgggarcgggcagccatgactcccttccctctgccctgatatcctgatctggcctgtctctccccagtcctggaggccctcaatgtgctggtgaatagaccgaatatcagggagcccctgcggatggacctcgctgacctgctgacacagaatccggagctgttcagaaagaatgccgaagagttcaccctccgattcggagtggaccggccctcctaactcatgttctgaccctctgtgcactggatcctcggcatagcggacggacacacctcatggactgaggccagagccccctgtggcccattccccattcatttttcccttcttaggttgttagtcattagtttgtgtgtgtgtgtggtggagggaagggagctatgagtgtgtgtgttgtgtatggactcactcccaggttcacctggccacaggtgcacccttcccacaccctttacattccccagagccaagggagtttaagtttgcagttacaggccagttctccagctctccatcttagagagacaggtcaccttgcaggcctgcttgcaggaaatgaatccagcagccaactcgaatccccctagggctcaggcactgagggcctggggacagtggagcatatgggtgggagacagatggagggtaccctatttacaactragtcagccaagccactgatgggaatatacagatttaggtgctaaaccrwttattttccacggatgagtcacaatctgaagaatcaaacttccatcctgaaaatctatatgtttcaaaaccacttgccatcctgttagattgccagttcctgggaccaggcctcagactgtgaagtatatatcctccagcattcagtccagggggagccacggaaaccatgttcttgcttaagccattaaagtcagagatgaattctggagtgcagctgagtctttgatgaggggatggggtggtttcatcaggaccatagaggactagggatttaagcataaatttctgaccttgcttcccttgaatgttccctaaacatcataaggaatgttggccatggaaaaataggccatccttggacagaggagctttcagaaggtccacaggggtgatgtccccattttattttatttatttatttatttatttatttatttatttatttaagacagaatctcactccgtcgcccaggctagagtgcagcagtgcaatctcggctcactgcaacctccgcctcctgagttcaagcgattctcctgcctcagtctcttgagtaactgggattacagatgcccgccaccacgcctggctaatttttgtatttttagtaaagatggggtttcaccacattggccaggctggtctcgaactcctgacctcaggtgatccacccgcctcagcctcccaaagtgctgggattataggtgtgagccaccatgcccggccaacacccccattttaaagatgaggcaattgaggcacagagcacttcagtggattgctggggtccactctgccaatccacacccctgcaggtgagccagggttatggctggggtgtgttttgttttctgtatttttcatgagctgctttcatcagcacacatgccccaaatggctgataaagccagactggatagttagcaggaaattgtaatcagctcaggggtttgtatctcatgagcaatggaaaaacaaaaacaagccaaaacttcagccagggattaacttcagttaagggattaacttaacccagaagaagaactttctggttgcaattgttgtaagctcctggaatactgctggcttttcagagatagaatatggggtgatttgagtcaaggaagtcacccagatcccactagtttctagagaatcttctccagctcctgccctggagtcccctaacctgagaagaagtgtgaaaagaggggaagataaccagaagaagtgccaccagagtcaaaatgtaagttttttatttttggcgaccacttactgaacacttgagtggcaggactgggcaaagctttttgcccatttcattatctcgtttaactcttgcaacaccttcataaggttggaactctcattatcccctttcagactgtaaactggggcccagagaggttaactgtatgtgtcacacagctggttagtggtgggaaccaggccattgtcctttcccaaacaccttgcgcagttattgagacctcagcaggtgaggaatcccctatggccagagtttattatcccagagtgcagaggttcctgggccaagtatggagagagcactgaggggccagacaggattttacaaaagtacttttaatgcagttaaaaccaacgccacacacccttgcctaagcccctggctctggtgcctccatggagcagaagggaacccccgggccgtggctgctgagctgggcaccctgcccatctctgcccacagagccagtcacctcctcacttcttcttggtcttcaccagtcctttctgcacaaggctgcggtacagttcctggatgtatgtgtagacgcacttggagtcgggcacagccaaccgcaccatgtcatccacgtccagcagctgagcacagtcagccagtttcctaaggaatggggtggaatgaggagcagaaggtcaaaggtgaaggatatgggagccaaggggatgggtgcaggcagcccagcaatgacgaagcccataggatgggctgggatgttggggctgggagatcatctaagccaatcatcccattatatatctagatgagataactgagaccccaacagagttaagacaaacccaggccaggtgctgtggcttcctttaggtaggtcacaggatgtagacaggtaaccccaaagccaacaccagtgaataattcaataatgagttttaggccaggcacagtggctcacacctataatcccagcactttgggaggccaaggcgggaggatcccttgagctcagtagttcgagaccagcctggacaacctagtgagaccttttcagagaatgggagcttctccaaaaaataaaaacaaaaattaaaataaaaaaagactcaaacccagctgggtctgattccaagcccacattttcattgcacttattgtcctcacatgggcgcaggaccctctggtctctagttctacattaacccaccacttccacatgcgtatgtatctgtcctctggaaccggggagcttctgttagaccaggcccctcaggaagaatttaaaggggccaggtgtggtggctcatgcctgtagtcccagcactttgggaggctgaagcagctggatcacctgaggtcaggagtttgagaccagcctggccaacatggtgaaattccatctctactaaaaatacaaaaattagctgggcatagtggcaggcacctgtattcccagttactcgggaggctgaggcatgagaatcactcgaacccaggaggtggaggttgcagtgagctgagatcataccactgcactcctgcctgggcaacagagtgatactctgtctcaaaaaaaaaaaaaagaaaaaaaaaagataaaggacagaaaccaaatcctagccagagtcctggcttgcagctgcagcatctccaggagcatcactcattcagtctctatgtacttatcaggagcctattatgtgccaggccctcttccaggctctgagaattcatcagtgaataaaaccaaaacttctgcactctcatggcatagaaattcttgtggcaggagacagtaagcaacacacaaagtagatggtacatcagatggtgagaggtgctaaggaggaaaataaggcaggaagggagacagggtatgttcttatgttggaggagatctggtattttttatatatttttaatgtatttatttatttatttttgagatggagtcttgctctgttgcccaggctggaatgcagtggcgtgattttggctcactgcaacctctgcttcccggattcaagtgattctcctgcctcagccttccaagtagctgggattacaggtgtgtgccaccacgcccagctaatttttgtatttttagtagagacaaggtttcaccatgttggccaggctgatcttgaactcctgacctmaagtgatccccacgcctcggtctcctaaagtgctaggattacaggtgtgagccactgcacccagctgtggtattttttaatagggtgctcagggtaggcctcttagagtaagtcatgtgcacatctggggaaaggagtccaggcagaggaaacagcaggtgcaagggccccgaggcaggaatgcttggtgtgtttcaggagctgctggcacttagcaacaagtcctctttttctaacttcgcagctgccctttggggctctgtgacaccactggctttgctgaggccaacaatctgagctaatcagtgttgggacctcctgcccacctcatgctttatcaggtgcttccccttggacgttctcatagactcctcccctccatcctcagccagcagaagaggaagcagagactcagagtgttttggtggtttgcccaaggccaaagtgagcaacacaaccccgggggcctgtctgacacctctggcaccctttctctgaagctgggtctcagcagtccctgcctaccaaagccagccataggtgctggcataggagaaaccagggccccagaggaaatcctcccttggggctgagactgcagggccaaaatccacgccagactgggagctgtgggaaggacacacactggaggattttggagaatgggacaagctccctgcaaccaatgcagtgccccatggttttgggttagggtgctgtccctctacgtgggagaggcaaaaccttcattcccattgagcctggggcgtgggtggggaagggcttcgccactgggggcttcggcattggccactccctcccctcatccccggactccatgggaatcggaggagagttctggaatgggcagtggggtgtgatgactgtggcagacactctttcctcttcacacttaatcttcacaacaagccctgtgatgtggggcctctagagaggttaagccagctggcgagggtcacagagctagggagaagcagggaggattcaaacccaggcacctcagcttctattctcctctctccttctccacacatccccacgacctcctgggctttcagctgcctgatgcctcctgtcggcctgtctttgtcatctgatgactcctcccaccttccagtggctctgcctgactcagaaccagagtccaggcagctgcaggagcaggacagttggttcacagcctgcaggtcaggagcacttggtgagagcagagctgcttgcccttctgatattcacttagagctgtaagtccagactgcaagtttccctttcattttttaaaattgtaatttttttttaaagacaaagttttgctctgtcacccaagctggagtgcagtgactcaatcatggctcactgcagccttgacttcctgagcccaagtgatcctcccatctcagcctcccgaatagctgggaccacaggtatccaccaccatacccagctaattttttgattttttgtagagatgggggtctcactatgttgcccaggctggtcttaaactcctggcctcaagcgattctcctgcctcggcctcccagagtgctgggattatacaagtgagccactgcgcttgactcaagcagagatttttgtctttttcacccactgctgtatccccagggcctgaaacagtgcctggccctcaaaaaatgtctgttggatacatgaatgtgtggcaccagcatcggtgtaactgcctcactactcaacccctgtgaatccagtcctcgcctaggctcccatccagctctgccagcccatggctgtggcttactctgctgtggagaaggccagggtgaagttgtgccggcgctttgcgggatccagctctgcgtagtcaaaggcgtcagggaagaacttgtggatgagggcacagaaggccataccactgctccagctggaggagaagttctggatgtccacatgctatggcaggcagggcacagaggaggcctcagtgaggctcagccagatggcctggacttggcccccttcccaccctcccaccctttggggtttgcaccacttggaccctccctggacccctgccccacccacgcagctctgccccatgcccacctcgtatttttttgtcatggctcggcaccactccaagagcatgttcttgacaccaccaatggctgccccggctgccttagtgttgcggaacaaggccgtggggccggaagctgccctgtgaggggagaggggtgcaaggccaagccagagaggcaggaggcyatgaagggccccactgggaggatccccagcccccaggtgtcagtcctcctgccttggcctgggctgttcccactgcccctgaggccaccctcccaccaacccagggttcctatgggaaagcccagcccagcccctggcctgtgtcctacccgccaaacttgtccacgatggctttgcggttctgtgcccsgggcccccggggccgagcaggggctgataccctgcgctctggtgccttctccttcttctcccctgaggaaggggactcagggggactctggggcacgtcgctgggtgaagactcactatatggagaagtccaaagacgtgtgagagaggctgggaccagcactgcaggacacagggagggggctgtggggctggagggtgggtggcactgcagtctaagggggtgtgtgcagctgtgcccagcactgggaggacattgagaaggaatcgtgagtctcagtctaacttgggggagaatgtggtctggtgaggacatgtgggtagagctaggacacctctgaggtct

SEQ ID NO: 95907 - DNA, 13251 bp, Homo sapiens
ataaagactgtaatttctccacatcctcacccacacttgttattttctttttttttttttttttttttttagtatccgtcataatgggtatgagatgatatttcattatggttttgatttgcattttcttttatttatttatttatttatttttttttgaggcggagcctcgctctatcacccgggctggagtgcagtggcacgatctcggcttactgcaagctccgcttcccaggttcatgccattctcctgcctcagcctcccgagtagctgcattttcttgatcactaaagatgttgattatcttttcatgtgcttattggccacttggatatctatgaagaaatgtctgttcaaatcttttgcctatttcttagttgggttacttgtctttttattattgaattgtaaaagttctttatatattttggatacaaataccttatcagagatatgattcaaaagtatctgttcccattctgtgagctgtcttctcactttcttgatggtatgctttaaaacacaaaagtttaaaactttgatgaagcacagtttacttattttttcttttgtagcttgtgcttttgatgtcaaactcaagaaatcattgtgtaatccaaggtcctgaagatttatgcccatgtcttctcctacgatctttataattttagcttttacactgaggtctttaatccattttgagttcatttttgtatgtgggttggggttggggtccaacttcattcttttttatgtggatatccagttatcccagcagtatttgctgaagagattattctttccccatggaatagtctagatcaaagatcaattgaccataaacgtgggggtttatttctgagcttttaattctatttcattgatctggatgtctgttcttatgccagtactacactgtcttggttactgtagctttgccttaatttttgaaatcaggaggtgtgaatctttcaaatgcattatttgttatttttcaaaattattttggctatttagagtgccttaattttccatatgaattttaggatcagcttgtcaatttctgcaaagaagtcagctgagattttgataaagattgtgttaaatctgtagataactttggggaatattgtcatctgaacaataataagtctgatccacgaacataggatgtttttccatacaaattatattttaattaaaatatgctttcatgctagataaataaaagatagtatgcaaagcagtatatagttcagtgtccaatgattgtttccattgacatgatatccaaaacagctttctttgacatgaattgagaatgtagcatgtcatgtcactataattatgaacatctgtttattttttttttgagacagagtcttgccctgtcgcccagtctggagtgcagtggctcaatctcggctcactgcaagctccgcctcccaggttcaagcgactctcctgcctcagcctcccgagtagctgggactacaggcgtgtgcctccacgcctggctaattttggtatttttagtagatatggggtttcaccatgttggccagactcgtctcgaactcctgaccttgtgatctgcctgccttggcctgctgagattaccggtgtgagccaccgcgcccggcccatctgtctatttatcccttgataccatcttaggctgggaaatatcacaaaaagagtgtatgacaacatctgtatactcttggattttacttgtatcatcgaaaatgacgtaacatgaaagttagaagttatcttttgtgtcaagattcttcatggaaatatggagtcaaggaagctaagatagttgcttatgtcctcaaaatacatggtctgtctcttttgtctgagtaaaagttcaactgaaaaaatttggatctttaccaaaattggattttccctaatataggagtattgtcttgagccattctacaagattgcttgttgcatcagacaaaaaaccttggtaaagcaatatgctctggaaattcttaagctgttttgtgccttggaggaaaacttaaaaactaaagcaaatgcctctgtcaaatgttctcatcccgcccagaatcactaaactctactgcaatattttgaagcaggtcatggagaaactaccatttcccttcattggaatgaaagtattgacatcccttagctgagcaaactcctggtttccatttgttatttgcacaagggcagcatcagattttattttttgatcccttttggaaagtgcaaagacctcctatggttttgtttttttatatatatttttattttgagacaactgtatattcacttgcacttgtaagaactgatacggcctgatctcacatatcctttatccagtttccccagacagtaacatcttgtaaaactatagtgtacgatatcactaccaggatattaacattaatacagtcaagatacagaacatttccatccccacaaggatccctcatgtgcccttttataatcacatctgcttccctcttgtctccacccttcccttgacccctagcagccactaatctgttctccatttatatatattttttattttaagaatgttatataaatgggaccatatagtatataacctttgggattggcttttttcaactaaaatggttctctggagattcatccatgctgttgtgtatatcaatggtttattcctttttattactaattagtattccatggtatgcatcacagtttatttacctgtatatccattggaggaaatctgggttgtttccgacttttagctattataaataaagctgctataaaccttcatatatggtggtgtgaacataagtctttctctgggataaatgtccaggagtgcaattgctaggtcttacggtaattgcatgtttagttttaaaaataaactataacagtgttttccggagtgactctgccattttatattgacagcaacagtgtatgaatgatccagtttccctgcatccttgtaagaatttggtgttgtcactattttttatcttagccatttgatatgtcctagtgatatctcatcatgattttaatttacctttccataatgactaatgatgttgaatatcttttcatgtgcttatttgccattgtgtatcctcttagtgaaatgtctgtttatatcttttgctcattttctaattggatttttttcacccttggttctttgtatcttctagatactagttctttgcttgacaaatggattggaaatattttttccctactctttagcttgtattttttttttcttttaacaggatatttttgcagagcagaagtttttaattttgatgaattcctatcaatttttccttttagtgttaaacctgagagctatttgcctcctcctaaatactgaagattttctcctattttttcctaaaagttttatagtttttatattttatgcttaagtccataatctattttgagttaatttttatataagatgtgagacttatcttgaggttctccttaacaaccccctcttttttttgcctatggatgtacaactgttttagcatgatttgcttaaaagactatctttcctccattaaattgcttttgtacttttgtaaaaaatcagttggacattcttgtgtgagtctatttctgagttttctattacatcacattgatctatgcatctgtttctccaccaacaaacagtcttgattatagtagctttgttcttccttttcaaaactgtttttagctcttctagttcctttgcttttccgtatagattttataataaccttgtctatgtctataaaattcttgctggggtttagaaaggaaactgtatataaatctgaggagaattgacatctttattttgttgagttttccaatccatttacatagtatatctctccatttatttagacatccttagatttctttcatcagtattttgtagttttcagtatggaagttctgtttatgttttgttaaatttacactgaagtattttactttctgagcaattttaaatggtactgtattttaaatttttgggtctacatgtttattgttagtatatagaaatacacttgattcctgtatgtttatctcatgtccagtaacactgctggactcacttattagttctaggaattttctgtagattcgtttggaatctacacctgcacatagagacagttctagatccttttccctctgtatgccttttgtttccgttttgttgcactggctagaacttctttcactatgttgaataaaagttgtgagagtgaatacctttgctttgttcccagtcttagtgagaaagcatccagtctctcaccattaagtataatgttagctgtaggtttttgtaggtgtttttatcaagcaggagaagttcccactattcctagctttctgagagtttttatcgtgaatgcgttttgaattttgcaaaatgcatttttctgcatcaattgataagatcatatgattgttcttctttagcctgttatgatggtgaatcagattgattgattgattgattgattttagaatattgaatcagactcacatccacggaacaaatcacacttgatcatgaagtataattctttttatatattgctgagttctatttgccaatattttgttaaaaatttttgtgtctatattcataagggatattggtctgtggttttcttttttggtactgtcttcgtctgttcttgtatcaaggtaataatagtttcataaaatgaattggaaagtgttctttcttcttgtattttcttgaagagattgtacagaatcagcgtcagttcctctttaataattttgtagaattctccagtgaaatcatccagttctagagatctctgtttttgttgttgttgttgttggggtgggggtggtgatttaaaattatacattaattttccctgatagttagagggctgttcactcatctgcttcatattggatgggttgtggtagtttgtggtttttgaagaagtggcccatttcatttaagttgttaagtttatgtgtgtagagttgttcttagcattccctttttatccttttgatgtatttagggtctgtagtgatatcccctctttcattcctgacactgataatttgtgccttctctcttttcttcgtcagtcttgctagtggcttgttaactctattgatttttttcaaagaattagctctttgttttattgtttttttcattgttttcctgttctcaattttattgatttttttctcttagctttattatttcctccattctgcttgctttgggttaattttgctcttttttttacctgggttcttgaggtgggagtttagattaaaaatgatttgagacctttcctcttttctaacatatgcatttagtactataaatttccttctcaacacagctgtgtcccacaaatttcatttctattttttattttttttgagatggggtcttactgtgtcgcccaggctggtctcaaagtcctgggctcaagtgatccttccaccttggcctcccaaagtgctgagattacaggtgtgagtcaccatgcctggccacaaattttgatatgctgtatcttcattttcattacattcaatctatttgtttatttttcttgaggcttcctcttcaacccgtgagttatttagaagcatattgtttagttttcaattgtttagatattttgttgtaatctttttttgctaccgatttctagtttggttctattgtggttggagaacataccctggatgatttcaattcttttaaatttgttgaggtttgttttatggcttaaaatatggtctactttggtatatgttctgtgggtatttgaaaagaatatatattctgctatgttatgtggaggcttctataaatgtcaattagatcctgttgttgagttaatctataaccttgctgattttctatttagttgttttatcagttgttgagagaggggtgttaaagtctgtgattaaaattgtggatttgcacagcccaaactgcaagttgcttattatttgaaatccagtggatatcttgacctacgtggcttggaagataagtggctttcccaaaaaccgtgttattggaagtggttgcaacctggattcggcccgattccattacccgacggggaaagactgggagttcacctattaagctgtcatgggtgggtccttggggaacatggagattccagtgtgcctgtatggagtggagtgaatgttgcttgtgtcttcctgaagattctgcacccagatttaggcactgatacagataagaaacagtggaaagaggttcacaagcaggtggttgagaatgcttacgaggtgatcaaactcaaaggctacacatcctgggccattggactctgtagcagatttggtagagagtataatgaagaatcttaggcaggtgcacccaattcccaccatgattaagggtctctatggaataaaggatgatgtcttccttagtgttccttgcattttgggacagaatggaatctcagaccttgtgaaggtgactctgactcctgaggaagaggcccrtttgaagaagcgtgcagacacactttgggggatccgaaaagagctgcaattttaaagtcttctgatgtcatarcatttcactgtctatgctacaacaggactttagttggaggttgtgcctgatatcctttttatctgatctgtgattaaagcagtaatattttaagatggactgggaaaaacatcaattcctgaagttagaaataggaatggtttgtaaaatccacagctatatcctgatgctggatggtactaatttgtgtagtcctaaactggtttgtgtgaaatagttctgccacctctgaggcaccactgccaatgctgtacatgctgcatttgccccttgagccaggtggatgtttaccatgtgatatataacttcctggctccttcactgaacatgcctagtccaacattttttyccaatcagtcacatcctgggatccagtgtacaaatccaatatcgcatgtcttgtgcataattgttccaaaggatcttattttgtgaactatatatatcagtagtgtacattaccatataatgtaaaaagatctacatataaacaatgcaaccaactatccaagtgttataccaactaaaccccccaataaaccttgaacagtgaaaaaaattgtggatttgcctatttctccttccggtttatcaggtttttaaaactaacaaaaagttttttgagatagggttctgctgtgttgcccaggctggcctcaaactcctgggctcaagtgatctgcctgccttggcctcctaaagtcctgggattacaggcatgagccatcatgcccagcctagtttatcagtttttgcttcacatattttgcagtctgttgtttggtgcatgcaagttaggattgctatgtcttcttgttcatcatataatattcctttctgtccctgctaattttgttggatccgaagtctactttatctcatagtaatatagttacccttactttcttttgactaatgttttcatgatatattttttccatccttttcttttaacctgcctatattgttatatttgaagtgagttttatgtagacagcacattgttggataatgtttttaatttaccttgccaatctctgtcttttaattggtatatttagatcatttatatttaatgtacttacttatatgttatggctaagactgttattttattttttaattttctggggttattttcttgtttgtttctctgttttcttgtttcagccttcctgtgagttacttgaacattctttagaattccaatatagatatttacttatctatagtattgagtgtatgtctttgtttagcatttttagttgttgctgtaggtattacattacataaacataacttatcatagtctattggtattgttcctttaccagtttgaggtaagaaaacctcacttccctctatgtttgttttttaccctttctcatttatcatacatttgccttaaatttttcttccacatacatttagaaacacatcagatatggttataacttttgctttaatcttcaaaaggaatttagataactcaagagtagaagggaaatctattgtatttctcaggtttttgcttatcatttccttccctccttcccaatgctctaaggcttctacttttcttgtttactttttctttttttttttttcaagaatggttaatgttctttaaccattcatttagtataggtctgctggggacaaattatcttagttttcctttatctgagaatgtcttgatttcccctttattctggaagaatatttttgctgggtatgagattctgggttaacaattttctctttcaccacttgaaaagtattatgccacttccttctggtctctgtggtttctgatgagaaaccgactctcattctaattgtttcctccctaaaggtaagatgccatttatctctggctgctttcaagatttttttctttgtctgtagttttaagaagtttaattatgatatgtcttcatgtggatttctttgggcttattctgtttggagttcactcagcttcttagatctataggtttatgcctcttgctaaatttggaaagctttcatctattatttctttgagtactttttcagctccttatctttctcttctcctcagggactctgatgacataaatgttagatcttttatttatagtaccacaagtccctgaggctctgttccttcttttaaaaaattatattttcattgttaaagttgggtattttctattgttctattatccagttcacagattctttcctctatttgctccattctcctattgatcccaaccattgagcttttaatttcagttattgtatttttttagttctaaggtttttgtttggttctcctttatatattctggttatttgctgagactttgtttctcctttttttttcccccccagctttamtgaggtataattaacaaataaaaattatatatttttatataatgtgatgttttgatgtatgtatacattgtgaaatgattatcaccatcagagacttgctagttttttacttgcttcaaacagatttgtagtttcttgcttatgcatttttatcatggctactttaacaaattttaaacataattctaatatctctgtcatcttggtgttggcatcttttgactcttttttttttttttttgatagggtcttgctctgtcacccgggctggagtgcaatggtgcaatcatggctcactgcagcctcgacctcctgggcttaagtaattctcctgctgcagcctcccaagtagctgggactacagacacgtgctcccatgcccagctaatttaaaacattttttttgtagaaatggagccttactttgtgacccaggctggtcttgaactcctagacccaagcagtcctcccactttagcctcccaaagtgctgggattagaggcatgagccactgtgcccagcctgtcttttattttatttaattaatttatttttgagatgaagtcttgctctgtctccaggctggagtgcagcggcgcaatctcggctcactgcaacctctgcctcctgggttcaagtgattctcctgcctcagcctcccgagtagctgggactacaggtgcccaccaccatgcccagctaatttttgtatttttagtagaggtggggtttcactatgttggccaggatggtctcgatctcttgacctcgtgatctgcccaccttggtctcccaaaatgttgggattacaggcgtgagccactgcgcccagccccaactgtcttttaaatttagtttgagctctttatggttcttggcatgttgagtaatttttgactgaaaactggacatttttgcactattatgagattctataccttatttaaactttttgttttagctggatttctctgatgctgcttcaataggggaaattgcagcactgccttcttactgacagatgggagtggaaatccaggttttccacttagcatctgttgacatctgaggtggagggttccttattactgatggatgggagatctagtactccatctggtcgtcactggtgggcagaggtgagggctcattaccacctggtagggatggataaaagtcttggctccctagttggcctcctgtggtaccacttgggctggggtaatgggacacctcactgcagcctaatgaaagtggaaattcaggttccccggttggcctttgctgacattataggggtgggaccaccatttttactatggtatggagtagtgtggctattggctacaagttttttgtcttgctggatgggttctttcatggcctttggctagagagagtgggcttttgttgggactttttgtttgtttgcatttgttggcacttctgtgttgctggctgcttccacttcaaggatggaatgtatgaggcaaaaagaaaacccaagaaactcaccactgtgtagtttcttggattctggggtccctagctagtcttccttcctctcttcacttttcaaattcttcttatatgtgttttatacataatgtttaggatttttagttgtatttagtggaagaagttgggaaaattatgtctacttcatcttccccagtgtggaagtctcgtctggactcatggacatttattcatactttgggttctaatccagtactacatttttttttttttttgctaaaaagttttcagctatggtcattagaaatgtctattcttttcatgttagaatccccctgagttgcttcaagggccagggaaggaagggacctcatgaaagggccaggcatccacttcaatgtggaaggaaaggtttgacttcctttgttgggcttttgagcccttcttccacctgacagcttgagtaaaagtctaacttgaagccatttctgtggctcccccaataactgttagacataaattggaggtgggctaattaactgattgcagggcaaagggctcaaacctctgcctytcctcccttgcaccttgatcttgcctatttgattgtgacaattcttcttcccaccttagctagtgaggaaatgggatatagccaaggcgatcacttacctggggtgacagcaagtaaacatgaaaaatgtgctggggaacacaaaaggacagtkatcagaaaggctttttctttcaacctaagtcatgatgttttgggcgtcggctagagttttccaagttatttataactgtccatccctgttaggagatatatgttttatctaaaaataggtaatctttcctaatcaaatgataaatgtgtgtgtcccaaatggaacccttatagttagccacctcattaacagaagttcaggtgaataatggaaatattaccaggatgacactggatcagatgcctcaagatgctcagtgcttggacattagggctctttgaattttcttagtggaagaccatgttagcagaggtagccttcacaagccgtgtcttttagaatgatgttcaacgtacttcttaatcctggcagctaattattgtgtgtgtagggggttttagggtgtgtgtcttcttggagtttatgttgtgtaatgtcagcatctggctgtttctctccaattctttttgaggaatcccaatggggcatctaggccccagccttagtgggtgttcaatactcatttcctcttcccacttaaggaaattcccagcgtgttagagccaacaggaacctacttactgtttctcaatcctggctgctcattagtaacatccggaaaaaacaaaacaaaacaaaacaaaaaaacctaaagcctgggccccattttgagaggaaaaaaaaaaaccaaacttttttttttttttttaaacaccaattcagtaaaggaggtagtgtttttatctccatttaacagatagagaccctgaggcccaggttaagtttctcccagacccgatggttgcctgaggttagagtcctgaaccttaatcaacctggagatgggcctttgttggtttccttcttttacaccagtggttctccagcctgactgaatgttcaaatcacctggggagaatttttacaaacatagacacctgggccccaaccctgtgcttccagcttaattggcctggaagggggttagtgcactgatgagctttttaatatctccaggtgattcaaatgtgcacccaggatctagaaccactgtttaagagcaaacaaatatggacaaccactcattttctagaaatgggcctcaatgcccaggattggaggtaagctggaggtaatgcccagaatccttccaggctgcccagtttttgatatagcaggggcatctggctgaatatggctctcaatcttttaattaattaatttcagtttatattttgtttaaaatatttttcaattggttgagaaatttagaaactgggagatttcacaaaaaagtccagatttcagaattccctaagtatatcatagtatctggtaatacttggctggactgagctggggacagggttgtcctttccagttagccacatcctcacygccttcccggcattcccgtcactggcctctgacgccacaggagtttgcagccagcacatttccttcattactgccccatgatgtcctctatcacaagtacacaaaaattgtgtactggtcttagttgcttttccagattgcaaacaccttaacgcagcgatttttaacctgagagtaattctgtccccccaggatatttggcaatgtctacagataagttcagttgtcacatcttggggtgggagaggggtgagggacagtgctcctggcatctagtgggtaggggctagagatgctgctaaacatcctgccatgcacaggacagccccacaaataggaatgatcctgccttgaaggtcaatggtgctgaggttgagaaactgccttaagtgtagcctctggcctcttgctcatttctgtatcccttggccggtttgtgatacatagtaagtggtcagttaaacgccagttggctacctgactcaggttcaggcatgttggcttttcctcacgtccctgctgagttcaggtctaacacactgttgcttggctctgagtgcaccatatggcc

SEQ ID NO: 95908 - DNA, 72653 bp, Homo sapiens
  misc_feature (1)...(72653): n = A,T,C or G
aaaaaataaatttaaaaattaatcagtacaaaagttcaatccgctaaacagcaaccctgctcttttcacagattgatgaacagagtgagctgaaagccatcgagaaagagaagaaggtgacagccctgccccccaaggaagcgtgcaaatgccagaaagaggatttggccagagcgttttgtgtaagaattgaatttgcatctggagctaattgtgataaggttttatgtttaaaagaaagcaacacaaagccctgaacagtgctttgaaattctgtgttattatcaattttatcatcaaggttggaaaatattgttgatgttgaatggttcagattccacaggtagaatatcagtacttgtcagtagagctcgtcttcaccaggcccttaccggaagacggcgtcctttgagacactctgtgtacgctgcttctcttcagcctcacatttcttggcaaaaacataaagggatggaagatgaagttgagacacagaaagtagcacagtccagtgttagaggtagcacagcccagcgtggagtccagctgtttcacatcaaagcccaaactcttggtcatccggtattcccaccgtcgtcttttataatccgtggagttgccaggtactaaaaccaaattctcccaagtttctcaagtgagtttgaattaattcctggccagtgcaagacaaacatttgcattgcacacaagtgtgtgtgtgtgcacacgtgcgtgcacgtgcatactcagaaccactacattttgggaaagcaaataaaaagcccccaggaaaagggcacatactacaatttcaggaagttggaagctagtgtcttttcttgagaataactcaagtctgtttcaattcaagtcctgtgtattagtatttggagagggggaggaagtatttcttctctgcctgcatattatccctacctagaaaatgagctagattttctttcactattcaaaagaatctagaaatcaattctgttctccctgtttcctctaccagcaagtacagttttcttgttattggctttttaaaaacaaggacacttttgttgcgaccagaacaacaaagtttccttccattatgactgactcataaattagctgtatttaacgaatttgtttacagaaagagcttgaatggagttgggcacaatataattgttttagctactgtttcttttttatttttaatttttgtgggtacatagtaggtgcatatttatgggttccagagatactttgatacaggcatacactataataatcacatcagggcaaacggggtctccattacctcaagcatttatcctttgtgttacaagtcatccacttacactctttgagttattttaaaatgtacaattaaattatttttgacaacagtcgccctgtcatgccagcaaatactaggtcttatttattctttctgactatattttttgtacccatagccctctccactttctcccaactaccctttccaggccctggtaaccatcctactatctccatgagttcagttattttaatttttagcttccactaatcagygagaacctgcaaagtttgcctttctgtgtctggaggtcactatgttatttgacttaatataatgacctccagttccatccatgttgttgcaaatgacaggatctcattcttttttatgggtgcatagtactccattgtgtatatgtaccacattttctttattcatttgtctgttgatggatacttaggctccttccaaaccttggctattgtgaatactcctgcgataaacatgggagtgcagatatctcttcaatattctgatttcctttcttttggttatgtatctaggagtgggactggggatcatataatagttgtatttttagttttttgtttttttttttttttgagatggagtctcactctgtcacccaagctggagtgcggtggcgcgatctctgctcactgcaagctccgcctcctgggttcacgccattcttctgtctcagcctcctgagtagctgggactacaggcgcctgccaccatgcctggctaatttttttgtatttttagtagagacggggtttcaccgtgttagccaggatggtctcgatctcctgacctcatgatctgcctgcctcagcctcccaaagtgctgggattacaggcatgagccaccgcgcccagcgtatttttagttttttgaggaaccctccaaactgttcaccagtcatactaatttacattcctaccaacagtgtacaagggttcccttttcttcatatccaggatttgttattgcctgacttttggataaaagccattttaactgtgatgagatgatacctcattgtagttttgatttgcatttctctgatcacagatggtgagcaccttttcatgtacctgtttgccattcatatgtcttcttttgaggaatgtctatccagatctttggcccattttaaaaacagattattaggttttctcctatagagttgtttgagctctttatacattctggttattaatcccgtgtcagatgggtagtttgcaaatattttcttccattctgtgggttgtctcttcactttgttgatgatttcctttgctgtgcagaagccttttaacttgatgtgattccatttatccatttttgctttggttgcctgtgcttgtagtatattactcaagaaatctttgcccagttcaatgtcctggagagtttccccgatgttctcttgatagtttcatagtctgtgatcttagattgaagtctttaatctttttttttttttttttttttgagacagggtctcactctgttgcccaggctggagtgcggtggcgctatctcagctcactgcaacctctgcctcctgggttcaagcaattctcctgcctcagcctcctgtagtagctgggattacaggcatgcacaaccacatccagctaatttttgtattcttggtagagctggggttttgccatgttgaccaggctgatctcgaactcctgacctcaggtaatctgtccacctcatctttaattcatttttatttgatttttattgataatgagagatggggtgaaatttcactctcctgcatatggagattttgttttcctggtaccatttattaaagagattgccctttccccagtggatgttcttgacatctttgtcaaaaacgagttcactgtagatgtatggatttatatctgggttctctattctgtttcactgatctctgtgtctgtttttatgacagtaccatgctgttttggttactaaagctctgcagtataatttaaagtcaggtaatatgattcctccagtgttgttctttttccttaagatagctttggctattctgggtcttttgtggttccacataaatttttaaattgttttttctatttctgttaagaatgtcattgttattttaatagggattcgattaaatctatagattgctttgggtagtatggacattttaacaatattgatttttccaacccatgaacatggaatatctttccatttttctgtgtcttcttcagtttcttgcatcaatgttttatagttttcattgtagagatcttttacttctttaagttaattcctagatatttaatttgcagctgtggtaaatgggattacttaattgatttcttttgcagattgctttctcttagcatatagcaatgctactgatctttatcatttgagtttgtatcctctaactttactgattttgtttatgagttctaatagctttaggtggagtctttaggttttttcagatataagatcatatcatctgcaaacaagaataatttgacttcttcctttccaatttggatgccctttattttttactcttgtctgattgctctagctagaacttacagtattctgttgaatagtagtggtaaaagtgggtatcctacgggaaaagctttcagtttttcatcattcaatatgacactagccctgggtctgtcatatatggcttttattacattgagacatgttccttctatacctagtttttttagggtttttattatgaagagatgttgaattctgtcacgttttttcagcattaattgaaatgatcatatggtttttgtctttcattctgttgatgtgtcacattaatttgtgtatagtgaaccatccttgcacccttgggataaattccttttggtcatgatgaattttcattttaatgtgttattgcattcaatttgcttgtattttgctgaggatttttgcatcaatagtcatcagtgatattggccagtagttttcttttttaaatgtgtctttgtctggttttggtatcagggtaatactggcctcgtagaatgaaagtattccctactcatctgttttttggaattatttagtaggattggtatcgcttcttcgagtgtttggtagaattcagcagtgaagccactgggtcctgggcttttcctaacyggaagactttttattatggctttgatcttattacttgttattggtctattcagcttttggatttcttcatggttccatcttggtaggttctgtgtgtctaggaatttatccatttcttctatattttccaatttattggcatatagttgctcctggtagccactaatggccctttgactttctgtgatataatttgtgaagtttcctttttcatttctgtttgtatttatttggttcttctctctttttttcttagcctggctaaaggtttgtcagttttgtttacctttaaaaaaaaatactcttgtttcttaagacaggcctatttaaaaaaatgtctgatatgtggtaaatacacaacataaaatttaccatcttaaccttgttattttttccaagacatggtctcattctgttgcccaggctcgagtccagtgctgcaatcaagggccagtgcagcctccacctcctgggcttaagcaatcgtcctgcctcagcctcctgagtagctgagactacaggagtctgccaccacaatgggctaatttttaaaatttttttgtagagccaagatcatgctatattgcccagactagccttgaactcctgggttcaagcaatctccccacctcaacctcctgaagttttgggattacaggtatgagtcactgtgcctggccttaaccattttgaagtgtacattgtagttgcattaagtatagtcacactgttgcacaaccatcgccattctctatctccagaattctttttttttttcttgagatggagtttccttcttgtcgcccaggctggagtgcaatggcgcgatctcagctcactgcaacctccgcctcccagcttcaagcgattctcctgcctcagcctcctgagtggctgggattacaggcacatgccaccacgcccggctaattcttgtatttttagtagagacgggcttttgccatgttgacaaggctgctctcgaactcccgacctcaggtgatctgcctgccttggcctcccaaagcgctgggattacaagcctgagccaccaagccctaccagtttattataaaggcaaaggataccgatgaagagacgcatagggcaggtaatgggggaaggggcgcagggcttccatgcccaatgctgctatgaacatggttgttcaaacatctccctggatgccactctccaggaatatccccacgttcaggtacgtgaaaactcactgaatcctatctttgggtttttagggaagcttcatgacatcattccttcccccagattatagggtgggaccctctcatgggagggtcttaagacccacagtcagcaaagcgggttacattagcatctccagtattcttttcatcttgtaaaactgaatctgtctccattaaacactcactccccattccctctccctccagcctctgacacccaccattctactttctgtctctatgaatttgactagtctatgtaattcatatgtggaatcaacagaatttgtctttttgtgactggtttatttcacttaacttcatcctcaaggttcaacttaaaggtgtatccatgttgtagcacgtgtcagcattttctttcgttctcaggctaaatagtatttcattgtgtgtgtacaccatgtttcatgcattcattcatcccttgaaagattggtgggttgtttcctcctttttgcttttgtgaacagtgctacgaacatggttgtacaaacatctcttggagccccactagcagttcctttgggtatataccccaaagtggaattgctggatctggtagctccctttttaattttttgaggaatcgccacacastttccataacagctgcaccattttacattcccaagaccttttttttttttttttttttaagaagaaaagatgtgtttctgcatttctggaagtctatgctgcatttccatttgttgaaatytaagacyagagtcrtcttttctgctgtaattataatggtcactggcttgtkccttttcctcctctctctgccccatctgcacggggtctttgaacaagtcccagcaccttggtggacaagcctgtgtccctggcccatcatggaagccgctgcctttcagagtgggagtctgtaccstgttgcctcattccttgctgcgcccatgagtgagcttgtgcctgacctctccttccaggtggacttacacactgggctgtcggagttctcggtgacgcagcgccggctggcccatggctggaatgagtttgttgctgacaacagcgaacctgtgtggaagaaatacctggatcaggtaggaccagaggtgtcattctttgcattaacatgcataagccagcgagggtgggkcagccattccatctttcaatgttgatggaaggcatccttggacagctcccgcccctttcacgctgccccagccagcctgagcatcagtcatgagcaaatcaccaactcccaggcaaccgcgatcaggaaaaacagtgatcactttcgtagacagttgagcaggccccgggccccacgctatatgagtaagtgaataagtaagcatgcgcttactaatcctcctcctaatcccgcctttgcacatgaggaaggagaagtgcagaggttgaaagatttccccagagttgccaggtttagcaaataacaatataggatgccctgttaaatttcaatttcaggctgggcgtggtggctcgtgcctgtaatccaagcactttgggcggctgaagcgggtggatcacttgagcccaggagttcaagaccagcccggccaacatggcgaaaccccgtctcttctaaaaatataaaaattagccggatgtggtagtggatgcctgtaatcccagctactgaggaggctgaggtgggaggattgttggaacccaggaggtggaggctgcagtgaactgagattgtgccactgtgctccagcctggacaacagagtgagaccttgtctcmacaacaacaacaaaaccaaagtgaatttcagatagataaacaagaagcaatttctagtataagtgtgtcccaatacagtggacgtgcttatactaaaaacaaaaagttccttgtttttctgaaatttagattttactgggtgtcctactgtaacctgagcccaaagtcacatagctgtgaggagcagtgcagagcagtgcagccagggagctgcacccagagccccttcccttgctagctgctgccatcggtgctggcgcggtgctgaatgaatggcacacaatcaaatgcctggaagccactaagaaggggaaagaaaaaactgcaattgacatggctccaagttccattctagaagtcggcagtccctgccacctttgcaggaccagttcagaaaggctcagtgaacaggcagaattttccaggtgcctgagggcatttagatggccttagatccccttttccagccttttgcatgctcttggccccatccctgacatccccttcttcattctctggcccctgggctgccccaggcttcaaccgccttcctattggctctgtgtttacagcttcctccattggtcgattccggaaccaatcacagtcccctgggcagcatcctctgtctccactctccttgaggtcccctccctgatcaaggctcagttctcagtgttctgggaatgttattcatcgatgcgttttggcagcaaaataggcttctgggtatgtaggtggttctggctagcccagaagcttcctaaaactgcagggctgagaasaggcagtggaggctcccggaagttggggttcagggaaggaggccgagacatgggctgtgagggaggagctcccctctgcggctggagatctctttgctctgccctggcaccccttccactaggacccgctcccccacttcccctggttatcctccttcctcgttcccctctgctctgtcgaaacccaccgtgaacatcttccttctcaccaaggatcctcctccagcctccagccagggtgttccccaaaatgaaatctcttaaatttcttgagagcagaggacctgctcattcatcttatagcttgtcggttcagcaatgcatctgtgggaatccttgtaggactggacgggagctcctgacggctgggttttcctgcccttgcgtatacgggttctgtctgctctcccttattaattccttacatgtgttgagttcctcctgcatgccaagtgttgtgattctcctatctttcccccagtgacagggaactcatcacctcacaaggcagccctgttcctctgtctcaggagtctcaccattaggaattctaccttagcacggcgtaaggctctggacgggatggcagggaggcactaggctggtgctctgaggaggtggcatctgggcagagatctgagtgaaatgagacggaaagccatgtgaggatgtggatggagggcgtcgctggagggcagggtgcagagtccctgaggggacaggagcctggcagcctgggaatcaaggtgcccagaccaggtgcattattattattgttatattctgggatagggtttctctggtgtccaagcaggagtgcagcggcataaacacggctgactgcagcctcaacttcccaggccccagtgatcctcctgccttagccttctgagtagttgggaccacaggtgcacctcaccatgcccagctcattttttcatttttttgtaaagatgggattttgctgtgtttcccaggctggactgaaactcctgggctcaagcagtcctcccatttctgcctcccaaagggctgggattacagtgtgagcctctgcacccagcccttgttgatattgtaactctcttccttatcctratctttggtctgccttctgaatccggttttatgtgtttgcatttcttttcaatcctctgtaacatgagctaccatgagatgtctctgaaatgaaagggcagatatataaaataaagtaaaaatcttctcaggaagttttgggaacggctgttttagagagggacatcattggagtccctagaggctgttacaggagcaggykgttactgagtttggtgactgggatgtgcaggatttggggagctggtgtggtgagagaggatccttggccgtcctgagccaggactggcatcttgccgaaagtcccggcctggagcgtcatggagatgtggagaggcgagaccaagaactcaaaggcagggctgaggccggtgtcttcagggggtcagtactgggacctgggagggtcaattgggtggagttccaggcagaggaggaccactgcatgggggtggtctccccagccctcggtcaccatggtgttgacctggaagcctggccctgaactgagacccctgtcacacaaacttctgcacagtaagaaacccattctggtccctgagactaaagaacgtgcccyaccctgttatttcctcttcagtttaagaaccccctgatcctgctgctgctgggctctgccctggtgagtgtcctcaccaaggagtatgaggacgccgtcagcatcgccacggtgagttccctgacagcgctcggctcccgggcgggcagccacaggtctgctgagtctctgcttgttattgtrtataaagaaaaaaaagagtttgctgtaggggggaaaaaggagcatacagaagaaagaaaggaaagcaaatccacatccttctttaccstaatatcaaggtgscctggtttattcggccactgcttgcttgctggacacacaggtgcttctgggtctttgctagagcagtgttgcrgggaattcctttcccgtgaccctgggatgaggggaatagagcctgggctgtgcacatttgccttccgaagaacaacacctttgatccattaccgagaggtaaccactgagcactcattttttttttatttagatgaaattcacataataaaatattgactatttcacagtgaacaattcagtgaaattgagtacattcatgatatggtgccaccaccacctctgcctagttccaaaacattttcatcacccagaaggaaaccctgtgctcaccagacagtcacttcctgtccccgctcctaccagcccttggcaaccaccaatctttttctatctctgtgggttgaatgacctattctggatatgtcactgaaatggattcagacggatgagttcatgtcctttgcagggacatggatgaagctggaaaccatcattctaagcaaactatcacaaggacagaaaactaaacactgcatgatctcactcataggtgggagttgaacaatgagaacacatggacacagggtggggaacatcacacactcgggcctttcatagggtcagggggctgggggagggatagcattaggagaaatacctaatgtaaatgacgagttgatgggtgcagcaaaccagcgtggcatatgtatacctatgtaacaaacctgcacgttgtgcacatgtaccctagaacttaaagtataacaagaaaaaaaaatggattcagacaatacatgaccttttgtatctggcttctcctgagcacatttttttttctttttttgagacagagtcttgctgtgtcgtccaggctggacagcagtgccgtgatctcagctcagtacaacctctgcttctcctgcctcagccttytgagcagctgggattacaggtgcccgccaccactcctggttaatttttgctaatttttatatttttagtagagatgaggtttccctgtgttggccaggctgatgtcgacctcttgacctcaggtgatccgcctcccttggtctcccaaatagctgggattgtaggcgtgagccactgtgcctggcctgagcaccttttgatggctgtcattccccacttctttccgtttgtyccagcyggtattttaaaatacaaacacagactcattccacacgatggaatttcctacttccaattaaaaggctggagtaggccgggtgcggtggctcatgcctgtaatcccagcactttgggaggcctggggggyggatcacgaggtcaggagatcgagaccatcctggccmacatggtgaaagcccgtctctacaaaaaatacaaaaaaattagcagggcatggtggcatgtgcctgtggtcccagctacttgggaggccgaggcaggagaatcgcttgaaaccgggaggcggaggttgcagtgagccaagatcacaccactgcactccagcctggtggcagagcaagattccatttcagaagaaaaaaggctggggtaagttccacatctgctatggagaagggtgtttgcagcatgttcagtgaaaatggcagtttataaaagaatatgtccagattataagatgcggtgccttaagtgtgcctacgcagaaaaatctagatgggtactctgaaatgtgcacgtctgggtggtaaaagatagtgtcaattttttcctgctcttttggctagtatattttctaaatttctgtactgtgcacatrttttgcaagaagaaaggaaatcaatcattaaagacaagcccctagcctgccaygccctgtcccccctcccactgagcctctggtactgacaccctcctcygtttgctgtctaggcagtgcttgtcgtggtcactgtcgccttcatccaggtgagtatttcctgaggtcccagtcagggtaagctgggcgggacaggagcttcatggagtccccacctttaaacascacatctgatgtgcttcctgccaggagtacaggtcggagaaatctctggaagagctgaccaagmtggttcctccagaatgtaactggtaagtcagagcctccctgggactttttggttcactggaggagccagggagctggagagtttggcaaatgtttgctgaaagttgtatccttggtagtgtcggacaagagaaccacatctcactgggagttctaaggcctggtctccgcctgccaataggtcgctgtgtgtcctcgggcatgtcactcamcctctctgggccwcagctycatcatcagtgtctaaatcagggtgcctagcctgaggaccacaggtagcaggagtgactctgggaagagggtagcccacaaagcctgtgaaataatgtgcagaactgtgtgcattttttctagggagagggtctggaggtttatttgaattctcartgaatggtctcaggagagtgagatccaggtctttaacaagcagagccatcagaacattggctgcagcatagggtataggaagagtgaacttgagtaactactcagcagctgcaacagcctctttcctgcccacagttttccattggttactgcacggctcttaccaaagatgtttaacaaggaaagagacaagactaaaatgtctgccagtaccacatggccctttctgcttagcgtagccctgtgtgatagaacttgyaggaaatgttctattaatatcatctgccctgtccaatatggcatctgacaattctttttttgttgttttttaagatagagtcttgctctstcgcccaggctggagtgcagtggcacaatctcagttcgctgcaacctccgcctcctgggttcaagcagttctcctgcctcagcctcccaaakagctgggactacaggcatgcaccactacacctggctaatttttatatttttagtagaggtggggtttcgccacgttggctaggctcgtctcgacctcctgacctcagatgatctgcctgcctcagcctcctaaagtagtgggattacaggtgtgagccaccgtgcccrgccgacaaactaaattcttaatgttatttaattttaatttttatttaaatatgcacatggacctagtggctaccatattgggcagctcagctyagaacatctgcgggggcccttctaggaacagctgccattggtggaggaagctgacaggcccwggagggaaaacagctttttcctttttcttttctttctttcctttcttttcttttctttcttttctttctttcctttctcttctttcttttcctttcttcctttctttctttttctttttgttgttgttgttgttgagacagggtctggctctgttgcctrggctagagtgcagtggcaggatctcggctcactgcaacctgtgcctgcctccagggctcaagtgatcctcctgccttastttcccaagtagctgggaatacaggtgcatgccatgccaccacacctgactacttttttgtatcagctgctacaaaagttactgcattttttgcatttttattttttaaacctgattgtgtatgtgtgtgtakgtatgtgtgtacgtgtgtgcacgtatgtgtgtgtgtgcgagcatgtctgcacgtgtgtgtcgtgtgtgtctgtatgcgtgtgtctgcgtgcgtgtgtgcatgtgtgtgtgcgtgtgtgtatatgtgtctgtgtgtgtctgtgcatgtgtctgtgtatgtgtgtgcgtgtgtgtatgcatgtgtgtgtctgtgtctccgtgtgtgtgtctgtgcatgtgtatgtgtgcatgtgtgtatatgtgtstgsctgtstgtgcatgtgtctgtgtgtgtatgcgtgtgtgtgtgtgtgtgtgtatgtgtgtgtgtggagatggggtttcactatgttgctcagtctgggaaaacagctcattctaagcttaacttttagcatagcagtggtccataagctcgttctcctagtagaaaatgaaatgatttcaaaaaaggccaaagtcttctccccacccctgctaacattggttgaggtcctgtcaggctgatctgtctttcccgaacatacstggctgctcaaagtgatagaaggtatcctgtgatcagccgggcgcggtggctcacacctgtaatcccagcactttgggaggccgaggtaggcagctcacctgaggtcaggagttcaagaccagcctggccaacatggtgaarctctgtctctactaaaaattaaaaaaaaattagctgggcatggtggtgggtgtctgtaatcccagctacttgggaggctgaggcaggagaattgcctgaacccagagatggaggttgcagtgagccaagaktgctccaytgtactccagyctgtgcgataagagcgaaactctgtctcaaaaaaaaaaaaaaaaagtatctcatggtctggggtgtctgggaacaactcagcccaccctctgagtctccaagacccatttccaacatttggcaaacatacggcaactccgtattttctgaaggataattttcagggagagctttagtatatatcccaggcacatgttgtgcaactgagccatggggctagggtagaaagccgtagtgagatacggtcccgcgtctcaaagagtcagcattcaaggggygtgtgtgtataatacaaggcggagaatgacgaaggaccaaatagggacaagaagaggatgatacagaattgacccacatcacagagggtgagtcaattgtagragggccgcgggagcagtagaaatgtctgggctcgctggtcggatgaacagtgctgtcagaaatccagacatgtgacatcattaactgagcaaacggaagcataaatgatttatgtgatttgatgatccgatcttaagcttaaatatcgagtcttggcctttcaggtgaatagcgtgcattattgatgtctcccgggaggtcacttctaaaagacggttttatgtacaaaagcagcggtgtcgggcagcccagtagagttgaaagagcgctgaagaggtgaagcccaccctttgagtctctgagacccatttccaactcaggggaaaccctgctgtgcgggaccccctccctgtgttactccatccctggtgcaggcatcaaatatttattgagcacctactgtatgcctggagaaagggcactgaggttatacaagtggaagaaatggggaggcctcggcctttggggacctcacattcctaccaagggagtacataataagccagtgaagaacaagatgaccttggaattgtccaggtacacaaaagccaaaaaatactggaggccaccaaaacaaataaaaaaccccactgagatgtaatagtgactggtagaagggtgaggacaaccctaaatagctgtsgatcaggctgacatttagagaggaggtgacatttaagctgaggcctgaggaagaggagcctgccatgggaggagctgagggagcaacaggtatatctctggcaggtgctcttggctacaaggaacagaaagtccagttgcacaaacgccaagaaaagtatattgtctcatagccagggatctgaggtgggagccgtggggttagttaattcaggagagcacccagggcctggttctttcacctccttaccctgccaccttgtgcccactggggttgcattggttcttggctggctctcctcatggtcccagatggctgccacagctccttgcatcacagccaaacacgcaaaggccctatagaagaagggtgtgtgtgtgtgcgtgcacrcgcrtgtacagtaaggaaatcttttcccacaagcccccagcaaacatccactcatgtctctcgggccagtgttgcatgatgtgctgatacctaagccaatcaagggcaggggtcttagccaggcatgacccactccccagagcacgtggctgtggggagagggtggatacctcaacaagatcaaattccattaacaaggaagaggggaatttctgctcctgcatttgaggtctgcaaagcccctgaggccagaaggagcctgtgcgtttaagggggctggatggaatgagatgggagctgcaggaggctggctggccgtggaggagayctttgagtttggtaccagggtcatgggaaagccatcggagggtttggagcaggagggggttgggatctggtttggggttytaagagcgctccagctgccatatgyaggatgggttgaaggggccaggtcggaggtcagagtcagctgggacgggcaaggggcggtggtgtgggggattccatttggagcctgtacggaagcayatccgtagtctgagggcagctggtcatggccctgcgggaatggaggtcctgggcttcctcccagctgtgataaggctctgccatccctgacttcctgagacagaccctgcaccctgagtgctgtgtgctctgaggacaaaactctgccggctgcatttggaggctttagaactgctgaccttggccccaggagcctccctggggcatgtggcccacgtggtttccaggcagggtaaacagcaatggcctcatctttyagatgtggcccagggatgcccagaaaccacatactttctctaaagtcttataggatatgttaatttcaaaataataacaccccaaaggcacagggttggtgtatattaaaagagaaaagtgtgtttctattctccttgttcaaatntatcaagntgcataaaaacaaatgtcagcatggatgcttttgctttttaccatgtcaaatgcagcctaagagaaggaaaactccagcacctgcttgctcgagaactggttcctggtgatgtcgtatctctctcgatyggagaccggatccctgcagacatccgactcactgaggtgagtggntccaaacccttgtcaatggggtatttgatggagckggtcaaggagcagacacttagctaattgtaggcatgtatagtctctctcatacacamatgctcaaacatacatgcacatgcatacacacaagacaggaagttagcagacaagcgtgttctacgcatagagcccctcaaaccatatttcataaattgtcatcctcactttaagcctgacaacctttggctatacgattttccagtttaaagcaggctgcaataacaaattaaaccaaggtgggcttggggaatgatgtgagagttgcctctcaaaacagacacacaagtgttagaaagaagtgatattagaggcgggtggatcacttaaggtcaggagttcaagaccaccctggccaacatggtgaaactctctactaaaaatacaataattagctaggcatggtggcatgygcctgtagtcccagctactcaggaggctgaggcaggaraatcacttgaacccgggaggcggaggttgcagtgagccgagaccacgccactgcactctagcctgggcaacagagcgagaagcacacgcttttagagtagtgaggtttggggacattggctgtggggcaagcttcgtgggtctctgggtgtcacagcttcacagagccatgcctgaggcactctgctgagattatcctgggttcccaagaggttacatcaagttcaccatgatttgttgatgggagtaatctatttcaagaatctttccaagaatgtgtaaggactgttcaaagctttgcatgatgaagaattagacacagattatctgcctgatttatttactgatgggatgcattctcaggaactgtaggatcaaggacccgctattaagagggcagcatcagggaagcggatggagaagagcacaaagggttggaagctaccccctgggacctgggtttacaacattcctagcctgtctgtgaaataggaggcaggggccagggcttatgtgtggccactcggacattgakcctctctgccgtgaccttcagatttccaggcagggcagggataagggtgggagatgttcagttaccaaagtgagggagggttcgccctcgggctcaggctggtgccctctgtagcaccagatacagatcctctgtggcccccgcctctccccgtgttcagctccagcagtcagcgtctgaccccaagtctggggtgcatggatccggtcagaggaacggctgtctgtggccaatccccgcctacaagsaggactggggaagctgggctcacattttccacgttttccttctcccgagaaggggggtcctaacrggatgctccagatgccaggcagcttgtgagaaggacacaggtccrccacaagggctggtgcagaggcagagagaggccgtatgagaggtggccaatgacctggggttgggcattagcctgggcttgagccctgggaccaycattcaaagccttgtgaaccttgagcaagttagttaacctctctgtgcctcagttttctcatctgcaaaatggggggtggtgatgcccatagggtacttgggaggattacagatcttcagagatgccaaaagtgctcagaacggtgcctggcacaggtgagtgagaggcaggtgtggsggctgccrtactgcagtgtgtgttggaagtcagagaaccccaggccccatagctcctagggcgtgactcggggaaggaattcacctctctgagcttcgatctcctcatctctaaaaggggctgatgttggtttccatttcacagggttattgtgaagatgaaacaagctatgacccatgctgtgcttagcacatgccttttgtggggtaaacagtcaccagatacttgtgattgcttttattttttatcattatcgttctatacaacggttctttgaaacaactttttagaccccagrtaacttccttactgcttcagctggctttctctctgccctgcttatgttaaattaaactgtggctgggcacagtggctcatacctgtcatcccaatactttgggcagccaaggcgagtggattgcttgagcccaggagttcaagaccagcctgggcaacatagtgacactccatctgtacaaaaactattgtacctgtgtattgataccacgaaggttattttaaggctactggctgtgaacactctatggattttcctggtggtattctgcaattccattaaacaatcaatagctttgcctattcagtggaaaatgcttatcagctattaagctctgagatccaggagtacttcaagtgtacattttaaaaccattttggtctagcaggttcagcaggaagcagcaagttcaagaaagctcttaaagtaatagacctttttgcacagtatatgggggtcccagaacattattttccctttcctggagttaaaacagaggaagccctcagtcagaggctgagctggtacagccagcaagcctgggtcacactttctcccctaccatgtctaaaagaaaaagggaattgggtcggaggtgatgggactccaagtgacgcttcgtcttggaggtgggggcaccgggtgggcatgagccctgtgtgtgggagataggaggtgagcccgcgattgtgcctctgtcttcaggctcggcctgccgcctccttggtggctatgggttctgttcccccgactctattttcgcccctcacccctccttgccccttacctgagattgtgccctgggagcctgggaggtcaccagaagcccctcctgcccacctgctgaacccacacacaaccaccttcactccttcttggtccggaggtgccacctgatcttctacctgcctttatttttgtcatatgaagacaacraatatttttcagtataacaggtctatgctaaccaccgtatgaaaattgtttcatttgttctcccaacacccttaagagaccagcactgttatttttcctctgcgttattttactacacggacacagcagcccgcagaggttgcgtggccctgcgcagtcacacggcagtgggcggtggagggggacatgaccccgggcctctagctccgcagcccatgtccttacccccaggacgttctctctctccctgtgagcagctgttcagactcttcctggcactgcctctccccctgagtttcctccatgtatccgttgcccatggctgctgtggcagatgaccgcttacttaggggcttaaaacaaggtgaagatatggtctgaccttctggaggtcaaaattgaaatcgttttcactgggtggaaatcaacagtgctaacagggtccaggcrcggtggctcactcctgtaatcccagcactttgggaggctgaggtgggtggatcacctgaggtcaggagttggagaccagcctggccaacatggcaaaaccctgtctctactaaaaataaaaaaattagccaggcgtggtggcgtgcacctgtagtcccagctactcaggagactgaggcaggagaattgcttgaacctgggaggtggggttttagtgagscgagattgcrccactgcactgtagcctgggtgacagagtgagaccccatctttaaaaaaaaaaaaaaaaaaaaaaaaaaaaaagtgctactggggccatgctcctgcagaggctccaggggagaagctgtttcctggcctttcccagcttctagaagccgcctgcattccttggctcatggctccatgttcccgcaccactgcttctgttacatctccctgacatcagacacatctccaaccctccgtcctcccctcccttatgaggaccctcgtgatctcacggggcccacccyggtcacscagaccatattctccccacgccaaggtccttcagttagtcacgtctgcatagtctctgtcaccacatcagagaacacattcccaagttgaggattaggatgcggacatcatgggaaagctgggggcagggggacgttactcagcaggccacactgcagcccttttccaggtctcctccctcctcccttcctgccttggggcccccgaccccactccccatccacatcgctcattcattcaacaagtgtttcctgagcacctactacgtatgcggccctgggctgggtaccgrggacaccgtgcaggaagcagacctggtccctgtgctcgtgagtttatagcccagagtgacagactgacytaaatctactcgtgacaagtactgttccaggactgctaagggacccatgagtggaagtactgggaatcctggatttcccaaatgggagagacttgcctggcctggtgcactcagggagggcttcctggagatagcagcttttggcgcaaaacagccgttttaggcaaaggaggcccaagctacttgtctcatgctgaccaaaaagcctgataagttttcgctttcaactgccatgggggcacctaaaaccctcccccagcacatgtgacttaacctatctcatcccggaggtctctgctccctgtccctcctcccaggcctttccccagccacctcttctcaggggcctccctccctgctctgtacaccctggtgttggatccagtgcttgtttatcgtcatttcccccacctcctccatggagtatcatcttcctgaggcagaaattgtaccccattcactgcggtattcccagtgcccagaggagtctctggcctatcggaggatatggatggtcaggtttcccatcagtccaaacccacactcactccccaccccatgtgcctcctctcttccaaacgccttctcctccttcctccttctcttcgtagttkycttcccggggtgggggtcatctttgatctctccctttctttcttttttttttttttttaaaggacttcattgtttagaaatgttttagatttgtgggaaaattcagctcagggttcccatctacccctcacccgggatcccctcctgtttttaatgccttagcttacttgggtacatcggtcacaactaaggaacccatattgatgccttcttgttaccttgagtctgtgacactttcagatccccatagatttccctaatgtcctttttctgctccaggatcctacctgacatttagtggtcatgtctcctgaggttcttgttggctgtgacagtttctgatgttccttgtttttgaccttgaccttgacagtttcggttttgtttttgttttgagcagagtctctctctgtcacccaggctggartgcagtggggcaatctcggctcactgcaacctccgcctcctgggttcaagagattctcctgcctcagcctcctgagtagctgggattayaggcgcctgcccccatacccggctaatttttgtatttttagtagagacagggtttcactgtgttggccaggctggtctcgaactcctgacttcaagtgatctgcctgcctcggcctcccaaagtgctgggattacaggtgttagccaccatgcccggccgtccttgacagttttgaggagccccagccaggtattttccagaatgttctttgagcctccttcaaagactttcctcagcatcgctcagtgacttcttatgcttcattgtccagagctggagccgcgggagccacagggaggtgggaatgtgactgcgcagccggaggcctcgcctccctgacgctgtggggyccactgggaaggaagtggggagacgggcattacctgggtgacaggcggccactgtcgttcttggggactgagatgctatggcagtgcacatatttttaaaagatgactactaaatttaaatagttttaaattatagagaagtcgcaggtccctgtttgagaatcattgatctagctgtggttctctggtggtttgtggaagatggcttctctctagcttggtgttacatgcttacatgaccaggtccctagggataggcccacccagccccgctttatgaactcagaggtgtctggcacggttctggccctgggagcctcacctcgggagtgagatgtgttaagtytggggtcaagttgcggttttgcaagatggttaagagtatcgtttctggaaccagagcttcggttcaaatctctgttttgccactaactagctacggaaacttgaacaaattacttaattcttccatgcttcagtttccccatatgcaaaatggggaagatagtagagtcttccattgggggtggtgagttctgagggctaagccttgtggggagctgcgcacagggcctggtgtgtagtcagtgttctgcaaatgtcagtatctcccttccctttgccagggtgtgtgagkgtctctgtgtccctgtctgtgtttctggtgttactgttgccttagattctgactgaataacctggctyggttattgtgtgggattgtgtgggaaccatacagattgtacaggcatctccaaggtaaagagtgggctgcgtatgtggggactcacacaggtgttttgaaaggtatatcctaaaatagccatcaccttcattttttttttagattgtatcaaaatttygaacaacattaagcraagatatgagacttttatgtttttaagagaggccgctcattcaaagcttttctgatcctggaggcctcagaggccgtcgttgtgacactcattctgtaggttcactgtgttcttgagttcatgtccatgaaggtgctggtaccattttgtgcttttaacaccaattctcggggtgacagngagattccacagccttttccccttgctctcctaggtcacggacctcttggtggatgaatccagtttcaccggggaagccgagccatgtagtaaaacagacagccccttgacaggcggtggggacctcaccaccctcagcaacatcgtcttcatggggaccctggtgcagtatgggaggggccaggtaagccctgggacaccgaggccttgggctcccgtaacccacaggctcccagcccttagatttcatacttctctctctcctggacacagggggtcgtgattggaacaggggaaagctctcagttcggagaagtgtttaagatgatgcaggctgaagaggtaaggggcaggagggggcttcgggacttttgtaagctggagtttgagattattataggcaaataataccagccttgcctactccttaggaatgagtggcatgtggttcatatgagtatactttttaaacatttaattttttttttttaatagagacagggtttcgccatgttgcccaggctggtctcaaactcctgagctcaagcaatctgtctgcctcagcctcccaaagtgccaggattacaggcataagccaccacacctggcctcttttcaaacacgtaagacatttgttagcattttgataaagatacagctttcagacagtaatacgcacagrtcttcagtgcaaaagtcaatgaatgttgacatatgtgtacccctgtgtaatcatcactgaagytgtaggatggcaaggtgaagacattttgaacaaaggcaggcagaagctaggatcttgtccaactaacccattgtgctcaccctttcagacacctaaaactcctttgcagaaaagcatggacaggctaggaaagcaactgacactcttctcctttggcataatcggtgagtgaagcagtttccatactgggtttgttctgyagatggaggggagccatcataggggggttgccatggccgtttctcaaatatcttgctactcagctgcataaggcttggggattgggatcagaggctctccacaagcaacaagagctttctgtatagttggaccaggctggctgctgtaacaagcagccactacattttcttggcttaacagagtaaacgcttgttccttgctcacaccgcagtccaaagtccgtgggtgtattcctggtccagtggctctcctggatagctcgcctacaaacagtgacttgggcccaggcccctgttacattgctgctctatcttcctctgggtccttggaggccatgtttctgttcagccagcagayggtgaaagaggaaacatggaggcttgtggaggacatttttaaggcatagaccaggaagtggaatcatcaatttgaccatcttttattggccagaatggagtcacatggcctacataactgcaaaggagactgggaaatgtagtttatctgtgcacccaaacatatttctatgcttctaagcagsctgttcctggactgggacttcctgacctttggtaacacaacaaacagcattgacatgatgctgcggttctgaatctagatcttaaggcttgacatccccatagtgctgccccagtcccttcwskggcttcttcctgytctttccatatctggccttacttctgtgtcctttattccagcctttaggatcaacccatgcytggcccctaatagattctcagtaaatatttgttgagtaaaacatttaatcaaggaataaaccaacaagccactgcctatagcacatctagtgatgaggggggtgctggtgagtgtagccaaaactgcgaagccagagaacagtcttgagagaaacagcttatgtaagcccatgtttcttaagttaaattagaayttaaattgacatgtccacagcaagacccatgatatcattcagacattttttttgagggggcaggaatggagtctcactctgttgcccagactggagagcagtggcgtgatctcagctcactgcaccctctgcctcctgggttaaccaattctcctgcctcagcctcctgaatctctgggattacaggcatgcaccatcacgcccagctratttttgtatttttggtagagacagggttttgtcatgttggccaggctggtctcaaactcctggyctcaagtgatctgcccgccttggcctcccaaagtgctaggattacaggcatgagccaccgcactgggctttttttttttttttttaacattttgggaactgctctagcagatggagagttttgacactcagtcccatggaccccctagaaggcccaaggggcaggtgcagggaagcaacaccatgctggtcagygcttctagaggaaagtagcatttgccaattcccatggtgcaaatactctcagtgtggccgttttcaagctactaatgtatagacacagaacatggatttcggaagagatgtacctagttgattcttgtgagctcctgtgaggagtctccagccttctactatgggaatgccacaagggtggagtgagtacctagtgggggtggctctaggctcactgcctcacccctatttccaatagagctccccttgctaatctatttcatttgagttcatttgggttctagctaagatttcagctgatgactgagtttagtagccaatagtagaatgcccraaacaaaactaacagatactgtggcagctgcccccctcaatacatacacacacacaccccgctaccatccatcagaaaacatccctggccccctggcccctgcaaagcaaagctaacgttctttagcaagctctccaagggtgtcacctggcaacaccacccaccttcccagtccctactcacacctccgtgtctcgtacacctagtgcagtaactggtgtgcagtacgtatttggtaaattattaatgaaggaaaatggaaatggagtatatttaatcatgagtaccacagagtaaaataatttgaaaaaacagtgacctatctgcccatcacaggagcagttgcatttgccacaacaaacaccacatggggggatgttctggatacacgcagccgacggtaaactttgggaataagatgtaaatgcttgcgaacagtccaaaatagactgattgagccttttacttaaatttggcttggacctttcctaagaaagtaaaatcgggtttttgtaggtataaacgtatctcycttagaaaagagaagagacgggttgaaagtggttgaggttatcaggcgttcctctgtgcatgcattcctgtaaactctttaaggaagtgagtttgaatccctccaggcatcagcgtgtgtagtgcatatggagataaggatgtttttgtctcttccccaggtctcatcatgctcattggctggtcgcaagggaaasaactcctgagtatgttcacgatcggggtcaggtaagagtgctatggcsgccccttgccttgccagggtggtcaatgggctctgagcccttccctgccgcaagagaaggtggggaggctgcagaataggaagggttsggaaggtgcagccccgtcacccaaactccagcctcccaatagcaygttctccgacaggtacagagtgcccggcgaatgcttgcaaaatgaatgacagcaaatgatccagggtgtcccttttgtattaggctgttcttgcattgctaaaaaaaaaaaaatacctgaggcttggtaatttattaagaaaatagtttaattggcctatggttctacaggccgtacaggaagcatggtgtctgctcagcttctggggaggctccaggaagtttccaatcaaggcggaaggggaagrgggagcaggcatgtcacatggcaagagcaggggcaggagagggaggaaggggagatgccacatgctttgaaacaattagatctctcaggaactcactccagcaagaacggctcgaaggagatggcgctaatccattcatgagggatccaccccatcgtccaatctcctcccacctccaacaytggggcttatgtttcaacttgaggtttgagttgggacacacattcaaactgtatcagctttcttgtcactctttgcctgtgggtttgggtctttctggctaagagcaaggaccccagagccagcctgcctctgtttaaattctacgcttgccacaaaactggaggttctgtgacctccagcaagtttcttagctctctgtgccccagtttcctcctctgaaaaatgggaatgctcatataccctctcctagggcgactgtctggattaaaggagttagtctgtgcaagcacccacatgatacacagtgcagagtgagtgttggctcttaatactggtttacaactctatccaagcccttgtcttacagaggaggctatcagagcggcaatggatgtagagcccaaggccacacgcggacagcagggctgggagtcatcatcacttgatgatgctaagccgaggggacccgcccttcttctacgtagtgattcataagtcatcccargcccctgggtcctggtggccgagacagggagaggcacgggcagcccagcatcgtgcagcggtttgactttgtcagtagttcttcygtggctatttgccaagagcaagggaagcagaggccggggattgtcactaactgggtatgtcccattggaagggagcctaggggctgtgccaggacacggaggaaccaacccatgtctaggctcatgtcaggcccattggttcccagacagtaacgcacacgcagctgctgtctgcaacgtgtttttaggtgatgtgtggaaaatcattctagtgtctgttcatatgtatatatatgtaattaatacatcaaacccatgatgtaaacaaacttagatgtccatcagctcattaaagaataaacaacttaggtacagtggaatatttttcagccacagaaaggaatgaagtactgattcatactgcaacatggattaatgttgaagccattttcctaggtgaaagaagccagttgcacatgttatatgattttatttatataaaatattcaaaaataggtcactcggccaggcgmggtggctcatacctgtaatcctagcgctttgggaggccaaggcagacgatcacctaaggtcaggagttctagaccagtctggccaacatggtgaaaccctgtctctactaaaaatacaaaaattaactgggtgtggtggcaggcacctawaatcccagctactcgggaggctgaggcagaagaatcgcttgagcccgggaggtggagtttgcagtgagccgagattgcgccactgccctccagcctgggtgacagagcaagagactgtctgaaaaaagaaacaaaccaaaacataggtcacttcatagaaacagaaagtaggttagtgtttgccagggcctggggttggggagtgtgtagtgactcctaacagttatggggtttccttygggggtgaagaaaatgttccaaaattgattgtgcggataggtgcacgactctgcatacactaaccaccattcaattatatatgttaaaggagtgaattttattatatacarattatatatcaatagagaaaccagaaaggtatagaacaggcaactaagaatgctgttattgagagggtcctcggagcctttctaatttatatatgaagagtaaaccattattgcaaatgtgtgctgtaatgatcattacagtgaattacagcagacaaactcctggtggattgaggcatcccagtgtgtgctgggacacagaggtttgtcctgctggccagtgtgggcaagagaatcttgctttaagggttgagtgtactgggtctggtacatggtatsaggtacmtagtatcaggtgtacatggctctggtgcatagtcaggcttgcctgtgtatacatgaatgtacacgattatctggtaattagtagtagaagagattccaaatgccttattttttcaacgacactgcatggtgtgcattaattgaggggcaggtggtaaaatcaacatgtrggcagctgtgtgtcctatgacaaaagcattcaataactgttttttgagttaatgggaattggaaatactgtgtctggctttggatactttgtcactcagtgtatttaacaaacaaaatcttagtaacaccaaatgctgagagcacacaaaaaaaacatggaaaagaggagctggaatattatgtgatgatgtgggcacacagatgtgataaaaatcctaaaagcaaaatacaaatgacagacacttggaaaaccccatcccagataaattctaagtcataataagttcatctcttcccttaaagaaaaaaaaatcctgtaatgagacacacaagacattcaaaccacatcagaatacccttaaatgatagttttcaataggaaaagaagaacaagaaaaaaagctgtactcatagataatagtctttaggttttagctttaaacaacctataaatgagcggagatgtatgccaggggttggactttccccctagacctgtttggaaccatgaaaatgatgcagtggtgctgtacagstgtctttgctgggttgcagccctttttccctgaatatatgcccaggttctcggtttgttttactaatggccctgcgaaagggcatcttaggctctggataatgaaacccaagggggtctattgaatgtaggatggtcttgatctctagtgaattggggctttctggcttaatatcctgaacagaacgatcttcatggcgttgttttttttgtttgtttgtttgtttgttttcagacagagtttcactcttgtcgcccaggctggagtgcaatggcacgatcttggctcactgcaatctccatctcccaggttcatgcaattctcctgcctcagcctcccaagtagctgggattataggggcgcaccaccacacccagctaattttttaaattttaagtagagatgggatttcaccatgttggctaggctggtcttgaactcctgacctcaggtgatccacctgcctcagcctcccaaagtgctgggattacaggtgtgagccagtgcttccagccttcgtggagcttttgaggagcatttatccttcggtgttactgtgtatagcacgtgactgcgtgatctgttcttatcactttcattgaatccctttcatgttcatgtagtgttgggattgggggaggttgtkaacaagacagtcatggttcccaccttcaaagattgtaggtctcagtggggatggagaatcgatgggaatcaagggctagaggaagagagctgggaagagaggcagaggcaggtgggagagggagcgtgaagctgagatctggaggagctgtggctgatgtgatgaggccttggaggagactgggtgtgcatattcctgtggctgtcaaaacaaagcaccacaggctgcagggctggaaacagaagcttattctcaccattctagaggcyagragtccgaggtccaggtgtggcaggagcatgctgttcttgaagaccctagggggagaatcagccraatgcttctcagcttctggtgtcacaggcagtcctgagcacatagatatcttgcctctagtctctgtctgtcacatggtctcctcctctgtctctgcgtctcttctcttctttttataaggacgccagttgtattggactagggtggatactctaatgaccccatttttatttgatgatgtctgcaaaggccctgtttgcacataaggtcacattcacgtgtaccaggagttaggatgtgaacatattttattggagggacacaattcaaccccttagcagcaggcactgggctgccgggagaagggggtggatggacaacaagctcrttgaaggagatgaggacaaggaggcctgagccagggctgggaagacccgtctacgygaacgrcaaagttgccaagagcagcctgcaggtggacagagtaaagtcagttctgggccggrtgcggtggctcacgtctgtaatcccagcacttttggacactgaggcagacggatcacttgaggttaggagtttaagaccagsttggccaacatggtgaaaccccatctgtactaaaaatacaaaaatcagcyrggcgtggtggcrcgtgcctataatcccagctactggggggcagaggcargagaattgcttgaacccgggaggcagaggttgtagtgagctgagatcacactactgccctccagcctgggcagcagagtgagacaccatctcaaaaaaaaaaaaaaaaaaaagtcagttctagaatcttcaaggaattgaagagggagggaccagggtctkttggtgctggagaaggagcaggagtagaacatgtgatcccagttcacccttacacagcccatggggtaagtctggcctcctttttacagattgggaaacaggcttacactagcacaacttatgggatcagggcatggaagagayagacttcaaacyactgaagcctgatccaaagccgggctccttgtcagcaacccaacccccccacstcagcaggatggggactctgctgccagccactgcccctcactccctatccttggcrgccattggcaatgggctygagtttgtttgccccatgaatatgtattgggcatctgttgactctctgtttacatcaaaagtgctgatccagctggatcaggtagatctctgccctcctggagttttctggctggggaaaaaagtgaatgttaacaatttaagcacacattaataaaaataattacaacttatgagtgctacaaaggaataactgccgagaaagagattaaaagggaggtagaarccagctgggcatggtggctcacacctgtaatcacagcactttgggactctgaggtgggcagatcacttgagatcaggagttcaagaacagcctggccaatgtggtgttgcatctctaccaaaaatacaaaattagccgggcatggtggtgtgtacctgtaatcccagctagtcagggaggctgaggcaggagaatcgcttgaacttgggaggcagaggttgcagtgagccgacatctcaccactgcaccccaacctgggcaacagagcaaaactctgtctcaagacgaaaaaaagggaggtagaaggggatggactggaagaggtggccagggagggttatgggtagagagttgaggagtcaggagatgagcaggaagggtgttcaggcagggggaacagcacaggcaaaggtttgggggtgggaacatatccgagggtcacttgggggggaccacagctgagctctgtgagcagaatgagatgatggagttgcttagatcatggggaaactcatggccccttctcctattcctaacytcatcatcagagcctttcccaatacgccacgccaggctgtctctgtgacactttggaagcagagagatgaaaagtgttggccacccttgatttagagsccgaaggaagtgggaggtgggagccccagcttattacagaagcgggggctgggaggaagggggcactggagcaggacgccgagctgtgctggggacagtggggtttggggcattggaagagcacctgcagaggcaggcactggagagctgaggtctcccgccgagctgaagaacgggagggtccctgagagagatggcaaacctggatggccgctcccccaactcrgggctgggtggggccygagactcacatttctttctttctttttattatttcagtaggcttttcgggaacaggtggtgtttcgttacgtgaataagctatttagtggtgatttctgagattttcatgcacccatcacctgagcagtgtacactgtacccaatgtgttgagactcacatttcttttgtttgcttttttatttttaaatttttctttaagttctaggatacatgtgcagaatgtgcaggtttgttacatagstatacacgtgccatggtggtttgctgcacctaccaacccgtcatctaggttttaagccccacatgcattaggcatttggcctaatgctctcccccgaaccccccgacaggcctgggtgtgkatgtccccctccctgtgtccatgtattctcattgttcaactcccacttaggagtgagaacatgccgtgtttgcttgcttgwttytgagatggagtcttgctctgtccaggctggagtgcagtggcgtgatcttggcccactgccacctccatctcctgggttcaaactattctcctgcctcagcctcccaagtagctgagattacaggtgcctgccaccacacccagctaatttttgtatttttaatagagrtggggtttcactatgttggccaggctcatctcgaactcctgacctcaggtgatctgcctgcctctgccttccaaagtgctgggattacaggtgtgagccactgcgcctggctgagactcatatttctaacaagctctcaagggtgctaacacaggtggtccagggagcaccctctgagcgtgaggctgtgattcgacactgtcccctgagagcgggctccagcaagaacaggaccaggaaagaggccaagacacccgaacagcattctcaggtgactgagcctttggaggcaggggtggcggcagggagggagacatttgagcctcaaggaggctgccagagaacacaggactctcagaagacagaatgcttaaaatcttccccaagtaggctgggcacagtggctcacacctrtaatcctagcactttgggaggctgaggcaagaggatcccttgagcccaggagtttgagaccagcctagacaacatagtgagactgtctgtacaaaaacaaatgttttgttattagccaggtatggtggtgcacgcttgtagccccagctacttgggaggctgaggcgggaggattgcttgagcctgggaagtcaaggtttcagtgagccatgatcttgccactgcactccaacctgggcaacacagcaagaccctatcttaaaaaacaaaaacaaaagaaaaccaaaaaacsaaaaaaatctcctgcagatcatgagttcaggagtttgagaccagcctggccaaaacagtgaaacctcgtctctactaaaaatacaaaaattagccgggcatggtggcgtatgcctgtagtcccagctactcaggggctgaggcaggagaatctcttgaacycgggaggtggaggttgtggcgagccgagatcgcaccactgcactccagcctagggaacagagcaagactccgtctcaaaaacaaaacaaaacaaacaacaacaacaaaacacacacacacacacacacaccctcctgcmaataatggtgcatccaatccctgtcttataagccatgagaagcttcatgaggcaagaargacgattaaatatttccagaagaaaaagcaaaaaaggcttctgtgctcaagccccaaataccccaattctctccccacccagtgctatggtcacttccggtttcttgtcctaacctcccttgcagcacgggcatcccgcttgatccatgcgagtggacttgcacgtgggagacactttccccctctcatttgtcattttgaaagggcgaggtttttcagttttagtgccagattaaagccgctgaaagccactgagtcagaaggtggagatggcagcttagccagcggagattttccaaaataagtaaaatgagagaatcatttttttaaaactttaagaactttttwaaaacgaattcctgggtcgggcacggtggctcatgcctgtaaccccagcactttgggaggccgaggcgcgtggatcatgaggtcaagagatagagatcatcycggcccacattgtgaaaccccgtctctactaaaaatacaaaaattagccaggtgtggtggtgggcgcctgtagtcccagctactcgggaggctgagggaggagaatcacttgaaccctggaggcggaggttgcggtgagccgagattgcaccgctgcactccagcctggtgacagagcaagactccatctcatctaccatatatcaaagtcacaccaaaattccctatatgttaagtgacattcaagatgatacaaggcacttgcttttcctggtccattctaatcaatttttgttttgctttgtttttttgagatggagtctctctctgtcacccaggctggagtgcagtgatgtgatctcggctcactgcaagctccgcctcctgggttcaagtgattctcctgcctcagcctccccaagtagctgggactacaggtgctcgctaccacacccggctaatttttgtattttggtagagacggggtttcaacaygttggccaggctagtctcaaacccctgacctcaagtgwtccatccgtttctgcgtttcaaagtgctgggaatgcaggtgtgagccaccacacccggcccattctaatctttattagtctgtggattaattctttattattatgaattcatccaagtaatacaaagatgcccttcccctgccatatgggatgaaagtccccgtcgtaaccctccacaaatgtttgcttagctggtcttcacagcctgtgccataaaaccaacgaagccttctggctgtcactgtagaaaccgggcacagccccttgatcagattctgtaatcttggtttatataacttgtccatgcctgttgtattgtccctgggtgaaaggtcaccattcacaaccattctattcaaactgcctgttttgtaattggaatttgttgccaacatttaatgtaccatatttctttgattgtgagatgtacattctttttcacatttcaactcctctgaaatcagatcacttctaataagtgatgtaattagaaaacatggtgttactgattaattggcagtgtttattcttttctgagctctgcccaaaataatggtgcccttcacaatcaactgtcttagctctgatgaaatgtggtctctctgtgtgatcctggttgaatggattctcaccaggtgttcagccaacccaggtggagtgctcactgtgtgctaggccagcscaggcctaagcattgttatacccmcttcttcatgcagcaaatatttactgtatacctccttgctttgctggattttctaatgcagaggataaaaacagccacctggycaagcttggaggctcatgcctgtaatcccagcacttgggaatgctgaggagggaggatcacttgagcccagaagttcaagaccagcctgggtwacagagtgagaccttgtctctacaaatccttttttaaattagggagtaaatagtggtgcatgcctrtgtcccggctaccaggggaggcagaggctggaggattgcttgagtccaggaggtcaaggctgcggtgagccttgatggtgacactgcactccagcctgggcgacagagcaagaacctgcctcaaaaaaaaartaaaaaacaggcaaggcacagaggatcacgcctgtgatcccaccactttgggaggccgaggcaggtggatcacttgaggccaggagttcargaccagcctggccaacatggtgaaacctcatctctactaaaaattcaaaaattagccaggtgtggtggcacatgcctgtaattccagctacgcgggaggctgaggcaggagaattgcatgaagctggggggtggatgttgcagtgagctgagactgcaccactgcactccagcctgggwgacagagtgagactccatctcaaacaaacccagccacccttgtgtgatatagccagaaaatgtgttttgtttgaactgtatctttttcattggaatttgttgccaacgtttaaaaattgggagtttgcatgaaaaagatactggatttcsagcttctcttgggagcatgggaggcccggcagcactgtgcattgctgtggtccctggtgacttggtggtggctctttgtttagaggagggcctgggctctgggatcgccacgtgggcttgctcgccctggcsgatttcacgtatttcctgggcagcctggccccagggcctggaccgggcgtgtctcgaggggcttctgcagggtccctggcagtggctgtgggtgggttgcaggtgtggtgagagacagtggcccccttctcccaggatgtttctggtatctcagataacagaaactcctcatcacttctagtcccctaaatagtctctttctagaaattgtacagagtggatccatgcggtgacagcacttggagctccactgaagtcacatcttcccccctcctcagcctggcctcgggtggaggtttggtggggaggatccggccaacctccctcacctgctcaaaatctctcctccccctccccatcgccagcgaaggctgtttttttttttttttttttgagacagactttcactcttgttgcccaggctggagtgcaatggcaccatctcagctcaccacaacctccacctcccaggttcaagtgattctcctgcctcagcctcccgagtagctgggattacaggcatgcgccaccacgcctggctaattttgtatttttagkagagacggggtttctccatgttggccaggctggtgtcgaactcccgacctcaggtgatcgaggcgcctcagcctcccaaagtgctgggattacaggcatgagccgccasacccggcctttttctttcttaaacagctttattgagatataattcacatatataattcatccatttaaagcatacaatttaatggtttttagtgtattcagagatatacacagccgtcaccacagtccattttagaatattttattttatttgagacagggtctcactctgctacataggctgtagcacagtgacatgatcatggcccactgcagcctcagccttgacctcccaggctcaagtgatcctcctacctcagcstcctcagtagctgggattataggtgcacactgccacacccagctaatttatatatacatatgtatatataatwtttttttttgtagaaataaaaaaatgttgcccaggctrgtctygaactcttgagctcaaatgatctgccagtgtgatcctcccaaagtgctggtattataggtgtgagctactgtgcctggccttagaacattttcttttttcttttgagatggagtctcactctgtcaccaggctggagcgcagtggcgcagtctcggctcactgcaacctccgcctctcaggttcaagcaattctcctgcctcagcctcctgagtacctgggattacaggtgcatgccaccacacctggctaatttttgtatttttagtagagayggggtttcaccacgttgtccaggttggtctcaaactcctgacctcaggtgatctgcccacctgggcctcccaaagtgctgggattacaggcgtgagccaccaccccctgcctagaacattttcttatcgcctcaaaaagaaaccctgtgccctttagctatcactctacattcccacctatgcccacatcccagccctaagcaatcgctcatctttctttcttgtgtagatttccccattctgaacatmccttatgaatggactcgtgctctgagtggccttctatgtctggcttcttccactcagcagcatgttttccaggctcatccacmtggtggcatgtgccagtgccttgttcctttctttggctaaagtgtattctgctgtatagatagaccacatttggctcatccatttgttcactgatggacatttgggttgtcatagtttcttcatgtttgtttttacattttttaaaggaaaatttcaagcctgtacaaaagcagagaggatgataaagtgaacacctgtgtagccactacccagcttcarcagtggcccacttgcaaacactcttgccctttctacagcccacccctggctatgtcaaactggacaccaggcaccaggcatcatacctttccaccacttcaggagtgtggaatgtggggccagtcagccccgatgttgtggagtctcagccaaaagggatagaaagagccccctctacacatgctctcacctgttgacacacccagagaaggggtatcatgtgctgcagccccagtctcatttccaagagagcatctcaccagctcagcttgggtcacacgctctcctcgaatccagccaaccctggttatgagagagtggggtcgcaccgtacagggagagttggaggggtaagaaagaagtgagcagacaccccgaaasagatccacgcagcaggcaagtgtgtcgctgtggcccttcacctsccctgacctggacttccttgtctggcttcctcataggaagtgtctacaccactacactcatgaaaagtgaaattcaagggactcacgaggacccctggaaccaaaaactcttaatcccacttactgtctgattttgggaattccttttatggaacccaaarccttttctctctaataaatgagaataatgtmaatgcaaaatacttttaaagaggcaaaacagctgacagactaattcacattaaggtgtggatgactgacaggrgaggtcccttcccaagagcggggtctgcaggggagggctcaggacastgggtgctgcagaaggaggcaggtgcaccttaggattgggaatggagactagaaccaggacactggggacacctaagacaagcttcaccagccaaaagcattgccagccccagctgagagtcacacactccttaaatgtgttagaggggactcatttgacctttcgatccagcctggctgtggcggcyattccagagggtctgcccatcgtcgtcatggtgacgctggtcctgggagtgctgcggatggccaagaagcgggtcatcgtgaagaagttacccatcgtggagactttaggtgagggactccagctggtggaatccttacacgtggaattgaatgggggcttggctgtcagggcaatccagcctgngggtttcacaagcctgaggatggcaacttctcttttctataaactggtgtttgttgtaccaggttgctgcagcgttctctgttctgacaagacggggactctgactgccaatgaaatgacagtgacccagcttgtaacgtcagatgggcttcgtgccgaggtgagtsccaaaggaatttacaagccttaaggatgcacccagccaggctgtctcctttctanacwaagcacacaatgtsttctagaacacaataaggaagaaataaattggggtcatcttataatctccttgctaacatgactgattttgtttttaatcatcccatacttccttttaatagatatgascaatttaargtagcmtccttttttagttacttattaattataagcacattgcaaaatttaaaagctagaaaaaatcttccataccttccacgataaactaaccgtgattagtccatttgtggtttgtttgtttgtttgtgagagacagagtcttgctccrtcacccaggctggaatgcagtggctgatctctgctcactgtaaccttcacttctcgggttcaagcgactctcctgcctcagcttcccaagtagctgggactacaggcatgccctaataygccgagcttatttttgtattttctagtagagacgrggtatcactatatgttggccaggctggtctcaaactcctgacctcaggtgatccgcccgccttggcctcccagagtgctgggattacaggcgtgagccaccacgcccagcctgttttattttttaagccagggtcytgctgtgtcgcccaggttgcagtgcagtggtgcaatcatggctcactgcagcctctaacttctgggctcaagggatcctcccacctcagcctcccaagtccttgcgtgtttttcagtgtcctctgcgtgcttggcgtaattggaagctctctgaatgtgcaatttttttatcctgatattttttctacaaaactggccaaaccaaggggtgaacaggtgatggtccatgggccagtgcttgtttgaaaataaagtttccttggtgtaccaccacmcccatttgtgtacatattgccaatggctgctttcatgcctcagtgtgccgcaacggcagagctgagtagccacgacaaaggtggtatgggctgyaaaggctaacacgtttacccagcgctgttcttggaatagaagcactcttctatgctagttcttagttttcttaaccatcacttgtactggctgcagagtatcccactgagtcaacttgctgcarctyactcatgcctggtactgtgtccatccatgacgtatccaattaatcaataatctttcrgagaacatcttcatactgaaagccctgtccacgtttagrattrtgtccctggaatggatccccaggacagagattgtgggccaactsggggagcatgtttttgactcttggcgaaaccctttcttctgcctcgccctgcaggtcagcggagttgggtatgacrgtcaagggactgtgtgtcttctaccatccaaggaagtcattaaggaattttccaatgtctcagtgggaaagttagtggaggtaggtgtcaaaagcgccatgagggaaataggcatttacattgaggcttmtggggctcctctctgaaaagggaaacagccattgaacctactggttcttgacaatgactggcccatccaggggtgaggctggcacagcactgaaaaaatggcctcaaaagtgatggagacatcagaagtaagacgacagctaggctgggcacagtggctaatgcccgttatcccagcactttgggaggccaaggcaggagaatcacttgaggccaggagttygagaccagcctgagcaacgtagtgagaccytgtttctattatttttttwaaaaaaattatttaaaaagaagagctagaagcctctgtactcatcactgcccactgggaaggctctaaggagactcctgcccagagacgtgcccgatgaatggtaaaaagtgagcctgtgatgaatttcccctattgttattagtgagcmtgtgatgatgttcccctgttgctgtgatgagtcctgcrgtccgagctgtactcaccctttcacaggggctccctcctccccatgtagcaggcacccttcttcctctgtacagttcagtgagcgccacttgcaaaggacctgcctccaggggccacttcactatcacagcaaacrctgtcttggttttgcagattaaaaatcaaaaatatgaccaggcgtggtggctcatgcctataatcccagcactttgggaggccaaggcgggtggatcacctgagttcaggagttcaagaccagcctggcccacgtggtgaaaccccatctctactaaaaaatataaaaattagctgggcatggtggcacacacctgtagtcccagctactcaggagcctgagacaggagaattgccttgaaccagggaggcagaggttgcagtgagctgaggtcatgccactgcactccascctgggtaatagaatgagactccatctcgaatgaatgaatgaatgaaacaaaaatatgcaaaactagtaagtaataataaaaaagaaaagaartgggcagagaagtaatgcgagtgtccaggctcaccaggccgggaaggaagagcgctgggaatcccactctttttgcttgtctctttttcattttttaaatatttatgtataaattgaggtagaagtcatctaccatgaattcaccccgttaaagtgcacaattcagtggtttcaatwtgttcacaagttgtgcaaacttcaccactgtctagaatactttgtcaccccaagtggaaatgccatcatccccattatcggtcgctccccgttaccccacactcgtcaccacccgtgcacctgcctccctgctgggttccctcatgataactttatgggaaccaacattcagcacagccaagaaatagtcacgatgtttcttttaaaaagccgggacgctgagttgttttaaagagcaagtcttgtccccrcaaccccagctgtaaaaatgggacaggcccacaatgtctaactttttcatgagcccagtactaactacagatgtccggacaatccccttttaggcgggctgtgttgccaacaatgcggtcatcagaaagaacgccgtgatggggcagcccaccgagggtgcattgatggccctggcgwtgaaggtaggaggtcctggggtgkmtctgcggggaattctttcgctcggggctggattcattggtagaaagccagctcctgtctgagctaacaggastggrgacgttaggtaatcatggaagaaaatggcccamactggccttgggccatctgttggtggtggaggaggtgagctctgagattccacgggacttcagcaagttctgcrggtctctaatccctccaccagcgattccaaaagaatcctatgagcttccctgtggttcaggccctggtcaggtgttgaggcgacagacagtggaacgagactccctatgcacccaacacgaccctgtgctcaccgaggcaccaytgggaggggctggttcctgggaatgtattcgattgactccggggttcagtgttagaccctgagctctgtggctgtgcagggttgccccaggccattctgtacccagcaccaggtaccaagtggctgcttgcagtgtggaggggatgggtgggagctgatgggggcctgcygcattctgtgctcagaggacaagttagaagaaggagaggcagaaaacatgggctgggaatgcrggtgacaggaaagcaaggagaagagaggacaaaggacatgggaaaggaggggccggcagakgttaagaggagggagcaaaggaaggaagaaggtggccccggtcagctcccacgtctgtttccatggccacttggcctgggtccctcctcttcagccagagctggggctcccctggacactgtgggagctcctttcccmgacccgctccgtgctttctgctgtgtgacttgtctctgactcgggtgtgatcagaaccctctccatcaaggtcaagggaaaagcccgactcagggtgctcatcccccagcackgacccctcgctgccgccgagcctggcccctgcactcaccctcccttcctgcttcctcctggactttgaccactcctgcctgttctcactggcgagtgccgactttctcttcaagttcactccagtttccaccccagcagacacctctcctcatcccgggctcacttyactgccttgtattttcagcttacctgtcccatcactgagcaccagggctcacttcactgccttctgttatcagcttacctgtccctccctccagtgcaagactccaacctcccacaccactgccttcccaaagctggtgctgggcgggggagaggtggtcgccctctcataagcccccgtgttggtagatcaggtgcttttccccagtgtaagaacattggaaagtcattacaggctgagtgcagtggctcaaatcccagcactttaagaggctaaggcgggaggatcatttgaggccaagagtttgagaccagcctgggcaacatagcgaaamcccatctctacaaaaaatataaaaattagctgggcatggtggtgcatgcctgtggtcccagctactcaggaggctgaggcargaggatcccttgagcccaggagtctgaggctgcaatgagctatgatcacaccactgcactccagtctagatgagagagatcctgcctcaaaaaaaaaaaaaaaaaaaaacaaaaagattgggcacagtggctcacacctgtaatcgcaacactttgggagaccgaggcaggtggatcacctgaggtcaggagttcaagaccagcctggccaacatggtgaaacctcatctctactaaaaatataaaaattagctgggcatggtggtgcacacctgtaatcccagctactcgggaggctgaggcaggagaattgcttgaacccaggaggcggaggttacagtgagccgagatcgtaccattgcactccagcctgggtgacagagcaagactccgtctcaaaaaaacaaacagaaatcatgacatcgtattatttttcttccattcacagaagagaattctctctgcaatgtctgtaatagtgaatggagctcatttcccgttttaaaatagtgctgagtctgccccattcaacaactcctcgccgcccagaagggaaggtgccggcctgaccgcctggcaggaatgacacccatgtgtcaccttgcttccgccaccagccgtccctgcagcctagagaggagagaggttccagcacccagaagagatttccttgatgtgttataattttcctttttcctggggcctggcttaagattttggaatacagaacaaacactggctggcatgtaggaagtgctgcctgtgtgacaggcatggggcaagcactttgtggttcttacctgtctcacctgctctaaatggcactgaggccaggccagtggttcccgggcttttcttccattattgctcctggattagggtcttggggttactgaaataaaacaccactggctggtgatttagtgtaaccaaaacacactgaaacacagctctgtggccagaagttgaaatcaaggtgtgagcagggccaggctccgtctcccagtttctgggtgttactggcagccccgggcgttccttgactcgcagacgcatccctgccttggtctctcacaccaagctctgtctctgtcacgaggtgctccccgccacgcctmtgcgcagcgttttcctcttttttttttttttttgagacggagtctcgctctgttgcccaggctggagtgcactggcttgatctccgctcactgcaacctccgcctcccaggttcaagcgattctcctgcctcagcctcccaagtagctgggactacaggcgcctgccaccacgcctggctaactttttgtatttttagtagagacagggtttcaccatgttagtcaggatggtcttgatctcctcaccccgtgatccacccgcctcggctgcccaaagtcctgggattacaggcatgagccaccatgcccggccttcctcctcttatatccagtcatgttggcttagggccaaccctaatagcctcaaattgacgatatctgcaaaggcsctattccaaatcaggtcacattcagaggttccgaggttaggacttcaacatatcttttgtggggtacaattcaacccmactaaggagatggtttaggcatttcttccctaatcaccccactccctccccatgaaatttaatatggtagatacactgtattgtacgcatatctgcactttctacgtaaaaggagtagttttttgtgcccctgctgcaccgcattttcaccccctgtgggacagtgggatgcatgggtcatgactggtttacacctggggaaactgagattctgagttgtcacatcactgatccaaaagccaccaaagagcaacaaagggccaggctggcaaggaccccaggctgtggacggggggctggcaaggaccccatgttctggacgcagggctgtctcactgactcagggggttccgtctgagaaattgctacaccttcaagtctgaaacattcctcccggcagaaacactgcaggtttgtttctaagcagatttcagatagaagctgttgcaaagaccgtcttgtctgcccttcagccaagagaagagacttttttttttttttctaggtgggacattccaagagaaatggccttttttctatgtgctaaatgcttggatttcttatctgccagaggtggtttgaacaatgaataatttaaatggactgagctttgtatagagattggcttcggatgactcactaaaaatgtgtcattttattatgctagatggacttaagtgatattaaaaattcatatataagaaaaaaagagattccattcagttcagagcagaagtggatggcggtgaaatgcagtctgaagactgaggtgagacctttcaatcttcaacctcttctctctttctgcccgggcccccacccagagataaagcaaaatgcagacttcaaggataatttgaaagttcctggctgcttctgtgacgttccaaatacatggaaaaacttaatcaccatcatacctttgattctcttgggtctgcttctggctttttgtttaaaacagaagttcttaaagcagggtccctggagtagcagcggttgttaycacgcgagactttattagaaatgcagaatctcaggttccatgccagacctcctgagtcgaagggtccaggggtgggacccagtaaccttcattttctgcagattctgatgcaggtgcaaatgttgagatcgaccagcctgtaatccagtgactgaggccctgctgctaacaccagtcgccaacttgccagtcctctctttgcagccctgtgctaagttttttatacttcttagctcatctccccgtcatactggggagcaaatccttcagtacggaaggcgtgtctgtgtggtgcatcagcgtgtgcacacgtgttgtccctggctagaggaacacataccaagctatggccaccccgggtggacattacagctgatttttaaaattttcttttcagatttgttgtggcttttcagattttccttaaaagctattttttaaagtttttgttgccttctaccgttttctccacccctcctcttccctcccactctttctagaatctatcatgtctgcccacgcagactgctcagctcccactcagggctgtgggcagctcagccagctcatgccaggcccttcctgtgcatggatggacacatgtacatttcaggggcttagaagggattatagattttcaaaaaacttttagacctttaaatcttttcccttgcaaggcaatggtaatatattctcattgaaaaagtatagaaatatgacataaaaatgaaagcttctttcattccacccttcttccctccctccccaccacccacccagaggtaattctattttaagtctgggatggagcattgcagattttaaatatgcaaacgacaacatctggatggtattttcaaaacaaggtcactatttatagtgtgtgtaatttgctttttccccctaagattttcttttaatattatgtcttagatgtctgtgttggttaatataagcttgttatattaacatattaattatataatatgtaatatatattacatatattacatatattatttaatatatattatgtaatatatattataattgtataagaatatattagttatatataatatataatatayatataaataatataatgtaatataatacatataaataatatacaatacatatgtactataattaatgtattaacatctgtaattaatattatatttattaataacattaatatgttaattacatattaataacatatataattaatattatcttataacagtgttacattcacactgtgcacccacgtgagccaggtatgtccggtattgaggctaggggtacagtgtgactctcactgacccagggcctccccccgtggagttyatagtctacatgtttgtcatgacagagcttaagaaaaacacaggaaaaatgatcagctactcatgtggcttcactattacaagccaagtgctgggggtgggtacaaaatagacttggtgctgccctagggaggcaacagtctaatggaaatattcccagttaatcacacccccaaaggcacagtcccagctgggatgatacctcccgtgcatgaaacatacaagacgctctgagtgaccataacaagggaactgraaaaagaacaagggtagtacaggttgaagattggccttgttctttctctggactgcaaaacgttccatggatggattctagaacttcgcgaacctgtccagcascygtgaacagcaccagccyatgataaataactccgctgcaaagatcccygtgtgtgtctttgtaaccttgtgcagagtggggtgatggtcagtatgaaccaaggcttccagtgatagtggatttcttccctttgtcttttctaaggatcaggaagacatttacttcatgaaaggggccttggaagaggtgatccgctactgcaccatgtacaacaacgggggcatccccctgcygctgacgccccagcagaggtcattctgcctgcaggaagagaagaggatgggrtcgctcggtttgcggggtcagtgcctgtggtcccggcccagagctttaagcttgcatgtaacattgacttttaagtgcattcaagcagggtccctagtcaaggargtcacccgtcccaaggagtcaggcagcatgctgacggcaataatgtgtgcttggaacctgatggtcacatgaaaggcacagaggtccccacctcatcccagttccttagtgacccccattaatccagagaagagggtaccctcccttgctgagtttcctaaggcaggtgaatggrctgcaccccaaacattgattttcccaataggtctttttgctcattgcctcttgtcaggaaaacccgaagttcttttcagtcaaggaacatattttttcccttagccattttcaattttctgcagcagagccagtgccatccctgatgggctgaactgaacattaaatctcacatttcccttggtgtcatttgtcaccctggccagttacagaggaagcgtttagaagtgctcctgagcactggtattcccttgggggaaagtgagaggctttgggttggccttactggctcaggagccttggttttccccttcggggaacagagtttgtaggttgctggcaggcttgctcagaggtgtacggggcgagacccttgcggctttctggggcacagtgaagccagcgccgagcacgtgtcccctcttcccgagtgaggggagcgttccccaaagcattggcactttgcccccccaaatggtttgtgttgcgctgggtctacaataggcttacaggtaaatactgtgcctcagtttccccatatgcctaaggaaggcasgagagcagtgacttcattgattgctgtgaggattggaagagacggtgaatcccatcttagcttgccctgagccttgactctgtttcggtggcagagaagccaggcccagcttctgcragccaggtgatctgagaggggctggtataagaaggtccttttcacctcgctgacaccagcgacggggctgtggcgtccctcctgcacagtggagagattgggagacaatctggcacrtgggtggcagctgcttttgtcatggttgatacgaccaagccattcagtagctccctgttcttgtcacatcacgcctctgctgacgaaatggctcacttaagagtggacacgttagtaagtaaacatcccacgwggcactggcctctaaatctgcacctggcacttgggccccacytgtgtgctgggcaccaggttaagtgcckgtgtgaggccacgccctgaatycccaccgggcagaggagccggcccaggtgacacagccctgcctagtgcagccagcgccttcgcccggatgtctgctgcggagcgtaatgacgcgttccagggacttgctccaggccttgcgggagagcgtaatgagaacgggtcagtggcggaggagcagtgagaccttttcctgtcttcccccagtgtacacrcaggtccttttttgtttacaaatggacttgtcttccacctgtggctgggaaaactacaacctgggaactggccttagagaaggcctgtgcgtttttccaatctgtgtttagtctgggatgttattcctcagcaggtgaccgtggactgatgcctgctgcctggcaggcctgggacagtgcccgagtgacttagagaggcccccaacctgctagatcccctggagtggcttgggctttgagaccccccaccccacatgcatccaggggaagatgaaaaaccccacggagagggaaggagagttggggtgaggggagcacggaggcaggagtatcctcttgggatagagcgctactaggtggccactagaagcaggggatgctcctgggttggcaaagcccaggttcagggaggggaggggaccattggaaaaggggaggaagggcgccagcgtcattggcgcagtgtcatgactgtgtaggaggcatgccagccccatctttggtgtcagtgagggggcaaggatgttcttacaccacmccctctcagatcacccaggggcaggagctgggcctggcttctgtgccacagaaacagagtcaaggcccagggcaagctcacagcaagagtcccctcagctgggttgctcccctgtcaatttttcttaacctctgtaccgcgcccccaagactgctggagatgacaagatgagttagcacagagcaaatgagggcaagaactgttagaaacgtcccatcctgctccacctcacatgtcccattctgggccagctcacaggtttctgcagccacttttgttgggaagtggggtgggtcttataccatgagtggtgtattagtttattttcatgctactgataaagacagacctgagactaggtaatttacaaagaaaaagaggttgaatggactcagttccacgtggctggggaggccttgcaatcatggcagaaggtgaaaggcacgtcttacatggyagccggcaagagagaatgagagccaagcctaaggggaaacccctcataaaaccatcagctctcstgagatgtattcactaccacagagcattgtggggaaaaccaccccatgattcaattatctcccactgggtccctcccacaacacgtgggaattatgggagctacagttcaasatgagatttgggtggggacacagccaaaccatatcaagcagacagcagtggtaytttctgctatgcagctgtttctggcttccttctccatctgttgtgcacctgcgcaggcctgagagccgctgraggcatctctgccctccctttcaggctagggacttgttgcctgagccctctgcagaccgaggaggatctgggccatggtgggggctggctaacaaagggctgcgcacgttgcctcacacctgtaatcccagcacttggggaggctgaggtgggcagatcacctgaggtcaggagtttgrgaccagcctggccaacatggtgaaatcctgtctctactaaaaatacaaaaattagctgggcctggaggcgcatgcccgtaatcccagctactcaagaggctgaggcaggagaacggtttgaacccaggaggcagaggctgcagtragccaayattacaccactgcactccaacctgggcrataagaacaaaactctcttaaaaaacaacaacaacaaccaacaacaaaaaacgacggcccctaagcccccggtgacccctccttactccccctctctcctcagtgctggccctggcttctgggcccgagctggggcggctgacgyttctmggtcttgtgggcatcattgaccccccgagagttggcrtgaaggaagcagtccaggttctctccgagtctggtgtgtctgtgaagatgataacgggggatgcccwggagacggccttggccataggtaactgggacagggtcgggggtgaggacgaaaggacccatccrtcctttaygatggggggctgctaccaaagggaagcctccgcaaactcggtcaggagtgctcacgcctagccctacaggcttagaaaagacgctgagtattcgtgtgccagcattccaatttctgaggtgttctcgtttctgaaatgttggcaggttctgcaaaagggaagttctcatggatactgaggacctactgtgtgtcaggggcttttcatccgctgtcttcacaggcagcatcatggccatgtacagtttcagtctgccttctgcctctagctgtgtacccttggcaaaccattgaaccactctgaccctcagtctcttcatcaatagagggctagcagcccttctcctctagttacttttttttttttttttttttgagatggagtcttgttctgttgcctgggctggagtgcagtagtgcaatcttggctcactgcaacctccacctcctgggttcaagcaattctcctgcctcagcctcctgagtagctgggactacaggcacccaccaccgcgcccagctaattttttgtattttagtagagacggggtttcactgtgttgcccaggctggtcttgaactcctgaactcagggaatctgcccacctcggcctcacaaagtgctgggattacaggcatgagccactgcgcccagcccctctagttactattatatgggtggtctcagcctggtgctgggaaaaggttcacgggctttggaatcagagccgtgtcaggttccagtgttactccttaccagctgtgtgtcctcggcaaagtcacttctgtttccccatctttaaagtggggataatgaggcgtttggtgtaagttaatcctgtggatagaaccgaggccgtgcagcatggtaggtcctcagtaaaccgtctccagcatggttttattcttggtgttccccatggccgaggtggggccgggagtgaggggtgggnacrcgggcctcagagcaggccctcagaacaggttcttctgaaggaagaaacatcggcctgtgcaacgggaagctgcaagccatgtccgggraggaggtggacagcgtggagaagggcgagctggccgaccgcgtggggaaggtgggtccccggaggcttggctggyngtggggctgggtcacagctttgaaatctgattcttygtcttccccgtctccgtgtccaggtgtccgtgttcttcaggaccagcccaaagcacaagctcaaaatcatcaaggttcgctgggcaaggcaggcacaggctgcgctgctggggccgggccagagacactgtggytsgaggagctcatgcgtcngtcgggtgacagtgcagggcccgaccgtggcttccttctctaggtccagggcagctgccccrggagttaccttttyatagccagggggaggggaggaggwtgagcaggggcgcgtgggcagctcccttggagaggacgaggctctgaagttgccagcaacacttgcgctgacagccccttggccagaacacagtcacgggcccaggtttagctgcaggggatgctgggaagtgtcatctgtagctgggcggacacgagccccaccaaacctggggataattttaaagaagatgggagaactgggggacctttgctacatacagtgaaaactgggagctgtaattggataacgtagagggaaaaactaaaagagaagctatcttttttttttctgggggtggggttgtaggtacggagtcttgctctgtcacctaggctgcagtgcagtggcacaatctcggcttacttcaacctctgcctcccagggtyaagcgattctcctgcctcagtctccccaagtagctgggattgcggtgtgcaccagcacacccggctaatgtttgtaattttagtagaggcagggtttcgccatgttggccaggctggtctcaaactcctgacctcaggtgatccgcctatcttcgcctcccaaagtgctgggtgctttttggctttattcctkttactcaactccgtgcctccgtttcctcatctgtaaaatgggggaactattaatgccgtcagctgattcacagggttggtagaraattaaacaaagccaggcccatgaatctcttggcacacagcaggagcccaataaagagctgatgtgatttttctgactctgaataccaaaaaaaggtagaaaatgtrcttggttttctcgcctgtgctctgaaagtttgctcttgagctcttttagtagacgggctttcttctttcatgttatttttagctctacagagtaaatccctatgtgagttactcctcaaagaaggtagtaatacttaccaggtaccccatggtttccagggccgcactgttgattactgtttattactgggactggataacctttatgagcctttactgaccgtgctgggcaccgtcacatccrtcatctcagtttgggcctcacaacagccctgggaagaagaaactgttgctcccactttgcagatagggaaactgaggtcaagagggtcaagggctcgcccaattcccacagctaatgtgggtgaagctgggattcgaattccgggtgccctccagacagaggtgtctgtggctggccacagggtgtgcatggccgggcactgggaggtggtcgtcaggctgcaggccttcattgcctgctctttccaaaggctctgcaggagtcaggggcgatcgtggccatgactggggatggggtgaacgacgcagtggccctgaagtctgcagacattgggatcgccatggggcagacagggacggacgtcagcaaagaggccgccaacatgatcctggtggatgatgacttctcagccatcatgtaagctgcccttctggttgtttttcagttgcaaaaatgcctggggtcaccagcttctccctggaacctgctactgtggagatagaggggggggtctcgcrgagtccccagggagagctgaatctcggggctcgtcagtgtggsaggtgcccccaacyccaagnaccaacagcctctcatagcagggtcatggggtccatgatgcctggggctagtcacatgctgcccccaggggaatgttacggatakgaagcagagatgggatttgctgcctgtgggtgcatttcatgtggtactgggaatgcccgcctggctcaggctggtgggcagcagctgaatmtgtaaggaaaacctgtggccaaatacgtgctcacacttgagtgtggggtgagaaaggattaaaatgaacatcttccgtttgaggcctgcgtgttgatacatatatctcaggcattgcaaagagacctgggcagaaacacccccatcgctgaccacggaggtgctctctaggttctggggcttgcacaaaactatttgttctgtttcacttttctgtatttttttcttaatacatttaccttcctaattttaattagttctgagactctcctcataagctaatcgcagtggttagttgggggtgagggaaaactttttaagcctgatacaaaaaatccaaataaacaaatattgaggctaggtggatcgtgcactttacaaaggtgtctccacagttgattcgccataggaagccttaacacacttagaaaaaaaaaaaaaagtcatagatagctcttattattttgaaatacgtcccatcaatacctaatttattgagagtttttagcatgaagggttgttgaattttgtcaaaggctttttctgcatctattgagataatcatgtggtttttgtctttggctctgtttatatgctggattacatttattgatttgcgtatattgaaccagccttgcatcccagggatgaagcccacttgatcatggtggataagctttttgatgtgctgctggattcggtttgccagtattttattgaggatttttgcatcaatgttcatcaaggatattggtctaaaattctcttttttggttgtgtctctgcccggctttggtatcagaatgatgctggcctcataaaatgagttagggaggattccctctttttctattgattggaatagtttcagaaggaatggtaccagttcctccttgtacctctggtagaattcggctgtgaatccatctggtcctggactctttttggttggtaaactattgattattgtcacaatttcagagcctgttattggtctattcagagattcaacttcttcctggtttagtcttgggagagtgtatgtgtccacagccaatatcatactgaatgggcaaaaactggaagcattccctttgaaaactggcacaagacagggatgccctctctcacygctcctattcaacatagtgttggaagttctggccagggcaatcaggcaggagaaggaaataaagggtattcaattaggaaaagaggaagtcaaattgtccctgtttgcagacgacatgattgtttatctagaaaaccccatggtctcagcccaaaatctccttaagctgataagcaacttcagcaaagtctcaggatacaaaatcaatgtacaaaaatcacaagcattcttatacaccaacaacagacaaacagagagccaaatcatgagtgaactcccattcacaattgcttcaaagagaataaaatacctaggaatccaacttacaagggatgtgaaggacctcttcaaggagaactacaaaccactgctcaaggaaataaaagaggacacaaacaaatggaagaacattccatgctcatgggtaggaagaatcaatatcgtgaaaatggccatactgcccaaggtaatttacagattcaatgccatccccatcaagctaccaatgactttcttcacagaattggaaaaaactactttaaagttcatatggaagcaaaaaagagcccgcatcgccaagtcaatcctaagccaaaagaacaaagccggaggcatcacactacctgacttcaaactatactacaaggctacagtaaccaaaacagcatggtactggtaccaaaacagagatatagatcaatggaacagaacagagccctcagaaataatgccgcatatctacaactatctgatctttgacaaacctgagaaaaacaagcaatggggaaaggattccctatttaataaatggtgctgggaaaactggctagccatatgtagaaagctgaaactggatcccttccttacaccttatacaaaaatcaattcaagatggattaaagatttaaacgttagacctaaaaccataaaaaccctagaagaaaacctagacattaccattcaggacataggcgtgggcaaggacttcatgtccaaaacaccaaaagcaatggcaacaaaagccaaaattgacaaatgggatctaattaaactaaagagcttctgcacagcaaaagaaactaccatcagagtgaacaggcaacctacaacatgggagaaaattttcgcaacctactcatctgacaaagggctaatatccagaatctacaatgaactcaaacaaatttacaagaaaaaaacaaacaaccccatcaaaaagtgggcgaaggacatgaacagacacttctcaaaagaagacatttatgcagccaaaaaacacatgaaaaaatgctcatcatcactggccatcagagaaatgcaaatcaaaaccactatgagatatcatctcacaccagttagaatggcaatcattaaaaagtcaggaaacaacaggtgctggagaggatgtggagaaataggaacacttttacactgttggtgggactgtaaactagttcaaccattgtggaagtcagtgtggcgattcctcagggatctagaactagaaataccatttgacccagccatcccattactgggtatatacccaaaggactataaatcatgctgctataaagacacatgcacacgtatgtttattgcggcactattcacaatagcaaagacttggaaccaacccaaatgtccaacaatgatagactggattaagaaaatgtggcacatatacaccatggaatactatgcagccataaaaaatgatgagttcatgtcctttgtagggacatggatgaaattggaaaccatcattctcagtaaactatcgcaagaacaaaaaaccaaacaccacatattctcactcataggtgggaattgaacaatgagatcacatggacacaggaaggggaatatcacactctggggactgtggtggggtcgggggagggatagcatcgggagatatacctaatgctagatgacacgttagtgggtgcagcgcaccagcatggcagatgtatacatatgtaactaacctgcacaatgtgcacatgtaccctaaaacttagagtataataaaaaaaaaaatttaaataaaaaaaaaagtcataatatcagctctatagttcttttcaaaatattttagtaaaatctggcggtgggggcacccacggtgcgtaattgtttttctacattagtgaccccaggtcaaggtttaaaagggcttccgcgaagagccttctaaagacagaagcaggcgatgtccttcagcctccccatccctccctccttaccgtcctccggacctcatttttaggccgaactggttttgctgcgtctctctctcctctttggtaaatcgcggagatgcacggcgcacttcgggagtctgggcagggatggggccccctgggctcggccggagagtaattcatggtctgattggaggcatcaggtgtacccttggcacagaagggcgaacatggctcaaggatcagttcccagtggccgaggggcacctgttagaacaccamcgtctcctacaaatgtgtccccaagaatgccagcaaggggaaccagcaggggcccaagtataacatcaatctgggcgagtcaccactgccccttgcagcaacsgatgcactggtccagccctcncgcaggcccgctccgtgagtaaatggctctcttctcttgcaggaatgcagtggaggaaggcaagggtattttttacaacatcaaaaactttgtccgattccagctgagcacgtaagtagaggccagcattccgagtgtcattaagcaccacgcctggcgggcggccgctgactggctgcgtgtgccccgcaggagcmtctccgccctgagtctcatcactctgtccaccgtgttcaacctgcccagccccctcaacgccatgcagatcctatggatcaacatcatcatggatgggccaccrgcgcagaggtgaggcagggccggctgggagccctgtgtctctttaccnacctgcggggcttcctccaggggctgctggctgtgccccaaggctatnnggatgaacaaatacagccactttccatcaggagttcccagaaaactgaagtgtgttgcactgsagtgagactgggagtagaaggcagaggagaaagtacctgggccggcagagctgggtgaggatggaactttcygctccctctgcctggatgctctctctgggcaacctgcatggctcattctcatgcttcattccagtcaccagtcactgccttcaggaagtcttccctgattgcactcccactcaatcccctcaccctgctgtatttttccctagagaggaagatacacacagacacacttttccttatggatctgattgtgatctgtctcccctttagaacatcagtttcatggaggcggagtttgtgtttcatccctgatgtctagagataaagggcttgccactcagtaggtgctcaggagtccaccygctccgcsacttaatatccccttcaacaagctggccaagtggtgtgggggaaggaatgcgctttggagtcaggggacccatctggccacgtgtgcgtaaccgtatgagcacagagccagtgcttccgctggagctcagtgctgctgttatcaccagtgayagctgccaagggaaagagagtcctcatttgtgtccccaaagccaagtgtgagggttacctctcctgccagccctccctgggagcagaagtgggaccaggaagctggcctcagctgtgtctgagcggcagggcctcacccggccactcccaccatacygcctgctgcgggtctagcctcaaccctgctgtgtggagttggctggaggctggtctctctcagctgatgaggggctctgcggagggcggagcctrgagcctgtttctccaggcgcaacgttggggggggtcccctcggggtgatggagatcatctgggtgtatggaactgtgtgtggttggccttackgggtggtcttccttcactgtctgcgggacagatggaggggcacagctgcccatggacccaggctctggggcttctggaaggtgccgaggagggcaggtgcgatgcctgggggcgttcagcaaatgcctggccctgccccctgtgccawctkggcctgggaggctcaggcacagctgtttcaagggtcctttatttcattcctggttcatttcaaagtgtctgtgtcttgttbggagcagcttgggggtagagccyrttgacaaagacgccttcaggcagccaccacggagtgtgygggacaccatcctcagcagagccctcatcctgaagatcctcatgtccgcggccatcatcatcagcgggaccctctttatcttctggaaggaggtgagckaggrtcaccccggcctgttctccaagccctggtgcngtgcagacgctggggactgcrgtccctgccctcctgccacagctcacatctgggagaggcaaacatgtacacacaccggacaatgtgatgccatcagaggcgtggggtgcatgaggcaaagggactgggtgacccytgaaagaagggaggtcgccaggtgtgtgcctgggaactacagaggccagcggggtggagatgactttgccgagacgggagttgaaatgtacatgaggacaggctgccccctgttcccttgtcaccaggaaacaatttgaaatctgctaaatatcctcctgtgttacactctagaggtgattgtttgctttggatctaggcctgggtcaccttttcatggcctgcaggttcagggagctctrtgccaggacgggccaygatctaggtgggaaatgaggcaggtgacccatgtgaccacaccacagattgcccatgtgcaggaagcgggaggggaccctggccgggtaccctgcctccattttccctccagctctccctctactactgacggccatccttcagccttccttgtaggaaatgaccttcactctgggtttaactggagtggcatcacctcccagggagacagttacttcctggaggaagtggtgtttcctccacccataggtgccctgcccccatcctcatggtggcagcaaatcagcatgtgctggggagaccctggggtagcagccactgacctcacacctggaggaagctgtgtgaccgattcatgagcttgtaagtggctcccagccrtgccccaggagcagtgaggcaggcctgtgccctttggttcaggatggaggttgtctcttcccgcctaacctctcacstttgtgctcaccttccmgatgcctgaagacagagcaagcactccccgcaccacgacgatgacgttcacttgttttgtgtttttcgatctcttcaacgccttgacctgccgctctcaggtgagacccgggctgaccctcctcgctgcagagctgctgtgtgttctcgacagcagcgccccgaccctgcccgcagcattgagcggctctrgctcagcgtgggcagtcagagctcccctgcctktacctggggtgtggacagcacacaatcccccgtgtgaccttctccctgcagaccaagctgatatttgagatcggctttctcaggaaccacatgttcctctactccgtcctggggtccatcctggggcagctggcggtcatttacatccccccgctgcagagsgtcttccagacggagaacctgggagcgcytggtgagtggtggggacgggaacgacasgtgacctcnaccagggccatggggggcggcagctgccaggtggggagctgcagcccaggaggggtcagtgcgggaaagcrgagctcaccaggggccggctctgtcttcagggcccttctgtcctcacaggaagggactctaacgtgggtgatgtgacggatgcacagaaacccctaggaagaggcctgtcactcaagagtagtagggtctggggcccaaggggcaccggcatcccaggcgtcsggctggaggctcagagcacgtgcagggaggaaggagggagcaaggcctgkactcagcctgggaggtaccccagctggggagcctggacttgaccctggggccagtaatstgacttagagatctggtcacctgaagrcagggagctgggctgtcttccagttttggctgaaaggsacatgattcagtcaccgtggttttccaagggcacacrccctggtgtggagcccaggggactccccgacattgtcagccaagcgagtgtggcacctttctctgaagctgcggttatggcaggcatggggcaaggggagggagccagggacaagycatcgaccccacccttttccccagkgtgctgagagccamccccaacccggaatagaggacgagggaggccagtgaggcagcccccaygggcccaccgcctccccgccggcagggcccagagtgggtcatggctcagatctggagggtcatgggattaygcatcagacctgaggctgcagtgacaacggtcctatgacctccaggcaagactgggatggtcaactctgccttgtcctccaaaaagcagtgtcagtgtgggtcaccagtgaatgccctgtaggaacagacaagaggaccccccaaaacactctgctcactggctgtttccacccgccrggaaggaagtcggcttcccacgcctgaaggggttgtgcttgggcagcccgtacatcaggaatcatcaacagggagccagggatggttcctcaaaacagcatgtgacaggagcagagggagacgctgggaattcatcccagggaacakgtcgctgggaattcatcccagggaacatgtcggggtgcactggacagggagcccagactggtcactcaggacatttgcaagcagcagggcactgggacagctgctgtagggaaargaaactcattccccttccagcccgagtccataacatgctcccagctgcctgccagacccaccctgtgctctggagctgcctggtgtttgcctggaaccacaggcaggcccttctggaactgcagcattttggatnctgggttaggaagatctccctgccttcaggggaatgaaaagggctggtcctccgcacctctcactttatcaggaggactggcagggaaggcgcttcctgccggcncaacagagctgcagccngtcctgaatcttttctgttttctccnttggcagatttgctgtttttaactggattggcctcatccgtcttcattttgtcagagctcctcaaactatgtgaaaaatactgttgcagccccaagagagtccagatgcaccctgaagatgtgtagtggaccgcactccgcggcaccttccctaatcatctcgatctggttgtgactgtggcccctgccgtgtctcctcgtcaggggagacttttaggaggccgcagccttccatcaccggatcagtttttcctcttaggaaagctgcaggaacctcgtgggctccagggacccaggcccacatccatccagcgttcccgctggctgtgggacagacagggaggggcctgtacagaaacaccacactrtttattaaatcacaatgatttttattaaccatgtctaactacgtatctgtgccacagcttgcagtgaggcaggccactcgtggcagatacaaggggctcctgagaggyagtgggtaggatggtcacactctgcccattgccctcctggaggccccatttcctcatcataaaatgagggacttttaaataaagtgctatgccgggggataattattttgatgtgtttacctagggtttttcatacaaggggccaggttggaaaccmacagccatgtgttaatggccacgtggkgtgagcagcaatccatcatgaatggcctacaggaaggcctcggcttttggasataaagagtagggctgggcatggtggctcacgcctgtaatcccagcactttgcaaggccaaggcaggcagatcacttgaggccagcctggccaacacagcaaaaccctgtctgtctctactaaaagtttaaaaaaaaaaaaaaaaacagttgccaggcgtgatgatgcacacctgttaatcccagctactcgggaggctgaggcaggagaatggcttgagtccaggaggtggagattgtaccactgcactgcagcatgggcaacaaagcaagagtctctctcagaaagtggcccttctctccggaaccaggaactgtagtatctcctgctgcctgcagacaagcttgatttcccactgccccaaagacttccaaaaaccsatctgctcttccacgtgacagatggcagaggagagaggtctccatgctgttcttctgcctgaagccacgccagaaccaccaaagggaaccagaaggggaactccgtccccatctctcaggaaataaggccagagctagaaccccccakttactagtcaggcctcactagagaaacagaaccaacaggatggagggagatgcagagatttgttttaaggaactggctcataggatkttgggggctggcaagtctaacatcttgagggcaggccagcatcctggagacccagggaagagctggggatgcaggctggaggcagaatttcctcctcctcaagggagttcagccttttcctcttatagtcctcawctgatcggatgaggcccactsacgttatgaaggataaactgtttgttttacttcaagtctacgggcttacatgttagttacacagcgccatctagaccagtgtttgtttgacgaaaatcaacttggcctggccaagttgtcagataaaagtacccgttgcacccagccacggtagctatgaaaagggctaccaggggtggtaacagctgggtcagacgaagataaggaaggtcagagtggacccctgccagggttccaggcagagtccaaagtcctccatagtaggattcacagcctgggaagaagcccctctctggctacaacctgtgacaccagggccacaggaggagatgcagcgatgggccattcctagtgagacacagacacagggctggctggagaagaaaccttttgagctgtggggctgtcttcctagaagctgccaacccctggaaccactaagaggtcaaggctgaagtgtgccacttccacagtctgctaaggagtgcctccccctgagtcagggacaattcttgctctacttttcaggatccttgggcacactgctggcccgagacatttacttcccatttaaaattaagtaatcaaaataccagggtcgattactctgaactcttgcttatgtaaactttagggataaaactgtagtaagacacaaaatgctaacaataaaatataaattagactacattaaaactaagaccttcttttcattaaggacacagtagacttgaacaccaccattaagcaacttagcttgatttacacttgtagaacaccccattcacgagtagcatagaaacagtcaccaaaataaagagcagaaatcaaacgaaaaagcaaaaatagaggaaaatcaatcaaaacctagtttttcgaagagatcaataaaactatcagtcttgcaataagcttatcaaagaaaaaagggaagagaaatgaccaatgtcaggaatgaaaaagtatatcaccacaaacccttcaagatattccaacaataataataaataatactatgtacatctttatgtacctaaattcaatcaattggatgaaataaaccaattgcttgaaaaccaaaaactaccaaaactcactgaagattaaatagataagctgaagttgaaacccttccaaaaaaggcagtttctgaagccagatgatttcactggtgaattttactaaacttgtaaagaaatggcaattcgatacactgaattccaaaaataaaaggggaccgagcacttctcattttataaggtcaacaatcactctgataccaaaactagagaaaaatactagagaccaacatcccttatgaatatatgcacgaaaatcctcaacaaaatatgaggaaatcagatctagccaggtacgaagaatataagacaccaggacgaagtggggttaattgaggaatggaattcaagcattccaaagttcaacattcaaaaccaatataactgaaaagttcaacattcaaaaaccaatataactcactatattaatagtctgaagaaggaaaaacacatggttatatcaattaatgcagaaaaggcatttgataaaattcaatctccatttgtaataaaaactctcaaactaggaattgaaggaaacttcttcaacctgataaagaacatctacaaaaaacctatagctaacatcatacttaatgatgaaaaactgaattctttccccacaggataaggtccaagggtgaccagcctcaccactcctattcagcacagtattagaagtcctagccagtgtaatatggcaagaaaagttaaaaggcattagcaaagagcctggaaaggagaaaatcacagataacrtaattgtccacacagaaaatcccaacaaatctttttaaaaaagaaaaaccctcctagaatcaacgagtttagtaaagccacaagatacaaggttaacacacaaaaagcagtcgtatttctatatattagcaatgaacaactggaaactgaaatttaaaattgaatactatttgtctgtctcaaaaaaaagtatcaattctcccgagattgttgtattaggtttaacacaattaccatcaaaatcccagggtttttttgtttttgtttttttttaagacacagataaacttgttctaacaagcttggtatgatattgttatcagcagacctatttcaatttcactggtttttacatagtatctgatgttaggcaaacctgagtttaagggcacagtgctccaggtggctggccaagtctgcccaggccttctgatactgactgcaggtccaagagtttcccacaaccaccttcaggttggatgattcgttgatgaggcacacagagctcactgacacctgtcatgctcacagccatgtctattaccaggaaaagatacagattagaacagccccagggctgcaactgcagagactggtcaccctctccctctgagctcaacagtttctgagtcctgagtctttctagcnaatcactgggtctgagagtggtttcctgccccccacaacacaagttctatgaaattgtatgacacacatcaattcaggtaaccactgctacaatgaggaggcaaaacttccatcgcccctgaaaaactcctccttactttttatagtaacaccctcctaatcccagcaacctctaatcccttcttcatcaccataatgttgttccttcaatactgttacataaatggaatcatggtatagaaccttttaagactggcttttgtcactaagcataatacctgtaaggtcccttcaagttgttttatgtgtgttcttcttcatggctgactagtattccactgcatggatgtaccacaatttctttatccactcactcatggagtgacagaaactcctgtacaatttttggaagtctatatgaatctaaaattatttcaaagtgtgtaagaagataagatatactcatagggcaaaaatacaccaggtaaagacaaacaacacacaagaccaaggtgacacagtctaatcagacaagattaaaagaaaggccaaaagcattaaaggagaccaagaaggaaatttaacaagatataatcaccactgaaaaatccataggccagactatgtaccaacacaacattcaaatttaaagaggaaacagtatgggaaattcaggcaaaggatacagaaaattcattatattaacttaccacatgaaaggacacaaaacctcagtgattccaaagagtagatctaatatagatgacttcttggtcgggcatggtggctcagacctgtaatcccagaactttgggaggccgaggcggttggatcacttgaggtaaggagtttgagaccagcctgggcaacatagcaaaaccccatctctactaaaaatacaaaaattagctgggcatggtggtgggcgcctgtaatcccaggctactcgggaggctgaggcaggagaatcgcttgaacctgggaggcagaggtagcagtgagctgagatcacaccayggcactccagcctgggcaatgaagtgaggctctgtcttaaaaaaataataatacagatgacatctctaatcactatgcaatctaatttaaagacgagtgacaggactaggggaaattctctagcacagcaaaatttaaaaactcttgggtacaagagaaaatcaaaatgaaggccacagaaaatctagaagcttatgatcaacacacacctatctatacaatactgcaaaataactcagggcccaagaaaaaagtaatagctttatgtattcatctacttccattattttttatttagtaaaataactcaaaaaactgaaaaaaaaaactgaagaaaagcaggaataatataaaagcaaaattagtaactgaatccaatctaggaaaatgaaaacacaagaaaaggaaaaaaaacataactacaaaagagtttcaatactttggggtcaatattacataaagtaatttgaagacttccagcagagatttaaaacaatccaatggtaaaagaaatggataaggttgtcaagagttaatcccatcctcacctacatcatcagaagcaggaatgcagacctgcaatatgcattttaagaagctctctaggcaaatctgatgcatgctcaagcggggagaactactggataaaagaggtcagtaagaggcctggaacggtggttcatgcctggaatcccagcactttgggaggctgtggtgggtggattgcttgagctcaggggtttgagaccaacctgggcaacatggcgaaaccacctctacaaaaaacacgaaatttagctgggagtggtggtgtgcatctgtagtcccagctactcgggaggctgaggtgggaggattgcttgactctggaggcagaggctgaaatgagttgaggtcatgtcactgcattccagcctggataatagagcaagaccctgtctcaaaaaaaaaaaacaaacaaaaaaaaaaccggcacggtgtctcacgcctgtaatcctggcactttgggaggttgaggtgggtagatcacaaggtcaggagattgagaccatcctggccaacatggtgaaacctcatctctactaaaatacaaaacatcagccaggcatggtggttgcacacctgtagtcccagccactcggaaggctgaggcaggagaactgcttgaacccaggacgcggagattgcagtgagccaagatcacgctactgcactccagcctggatgacagagcaagattccatctcaaaaagaaaaaaaaaaaaaaaagaattcagtaaggtaactgggaataaaaactacaaaaatcaagagcttcctatgttaaaataaccatcacttaggaaaaaatgtccactgacagtcccagaaatgacaataaaaatttacctaagaagctagatgtccctgttcttggatagaagcatcaacgttagccaaatgtcagcattaaatatacattaacataggcagaaccatttggaaagtactatcctattttttagaagtggtcacagtgcaaaggtcggagaaaataagcagccaagcatttgccgaaaaattccaaaaaacagtagtaagagaaaaacggctcttacatatttttatcaccaaattccagcaattaaaacatgagagagacctcaattcatacagaaactcagctgatgacaaagtatcattagaagtcaatgggaaaagacaaaccacttaatatacaaggtaatgggactttattttgggctaagataggactatatgtttaaatgccttttgaaggccaggcacggtggctcatgcctgtaatcccagcactttgggaggctaaaatgggaggatcacctgaggtcaggagttcgagaccagcctggccaacatggtgaaaccccatctctactaaaaatacaaaaattagccaggtgtgatggcaagcacctgtaatcccagctactcgggaggctgaggcaggctaatgtcttgaacctaggaggcggaggttgcagtcagctgagatcacaccactgcactccagcctgggtgacagagtgagactccatctcaaaaagtaaaaaaaaaaaatatatatatatatatatatgcatacacacacacacatatataatttatatatatacacacacataaaaatatatatatatacacacacacacacatatatatatataaaagccttttgaatagataaaagatttaagaggtaaaaacagaaaccacagtagaagaaaatgatttttaatactcagagtagagacagactgcctaaacaaacggcaaatccaaagacccttaagcagaaatgctgggaaatatgacagaaactgtaaaatttatgggcagaaaaacgccacaaacgaagtcaaataaactgtagaaaacattgaccatacatgggaaatgctacttcattcataaaaagcactgttggccgggtgtggtggcttgcacctgtaatcccagcactttcggaggctgaggcaggaggatcc

SEQ ID NO: 95909 - DNA, 36080 bp, Homo sapiens
agttcagtacttcctcctttttagaatgtatgctttccagataattagtgagataaagatttgattttcacttttagcatttctaaaagctgtaatatgctacctaacttgtttttaattcttgctctaacttctgatattttatagttgtgtattttgaattatattttaaaggattaagtggattattgcacatgatatttagtaaagtgtttgggagcatttagcacagcctccaaaaattagaattccactagccccctgatcctacatatctggcatcttaagagtcaataatagcaaagttgagagaggcagcttggtgtggtggaaagaacatgggtattggatccgatagccttaggttcaaatcctggcttcttcagtaattatcttctgtaattttagccaagtgtttaatttccttgagactcagtttctcgaagatgaagtagaaaatggctttcaccaggttgttgtaaagactgaatcaaatagtgtgcatgaaaattgcaaggcatagtgctcaggacatagttaacattcttaaatatatgttgaggaatggtgtgcacctgaaaattcctataaaagctgcaaatatacatgccttttgatccagctgttccacttcaggatatccttactcatgtgtgcaaagcaattttttgtagaaatgtttgtaatagcaaaagactggaaacaactgaaatgtacactgctagggaactgattactctctggtatgtccacgcaatgcagctctatgaaaaaaaggagtacgtgtcaagatatattaacaaataaagtacagaatattgtactgtacttatcccttttgtgtttaacaaaagaaagaaaaggagaaaaattagaatatagtatatatttgcctttatgtgcaaaaaaaggaaatcactttttgttttttttgagacagggtctcattctgtcacccaggctggggtgcagtggcgctatcacggctcactgcaacctcaacctcccaggctcaagcgatcctcccgccacagcctcccaagtagctgggactacaggcacacgccgccatgcccagctaatttatttatttatttttggtagagatggggtttcgcgatgttacccaggctggtctcaaactcctgagttcaggtgatccacctgtcttggcctcccaaagtgctctgggattacaggcatgagccactgtgcctgacctcttttcttcttgatgtgaaattcttcatagattagacaaatttgcccattgtgcaaatatgttgcaaatatattttctcagtttgtcatttatcttgatttttcttatggttttaaaaaaatgtgattggatttatggtttctggcattgaaccatagttataaatgtattctttactctgaggttgtccagggaatcttctaattttcttaatttaattttcatcttttaaaaacagctctattgatgcataattgatatacaaaaatagcatatatttactactatttgatgagtttggacatgtgtacacacccatgaagccatcagttaacctgatggtggtgatggtttcctgtaattttatgcttccatttttcacatttagatctgacttttctggaatttatctaagtgcacgatgtgaaagatagatacagcttatttttctttccagatggctataccttgttctaggacaatttattaaatagtccatctttttctttctgatctgagatgctatctttattatatgctaaatttctgtacatgtttaaatttatttgctccttttgtttgtctctttgtacaccagtatctacctcattgttctaattattcgagcttcaggatacattttaatacttctgggtaggaacagaaccttctcgttactcttacaaaattttcttctttattctggtttatttttcctaagaactttaaaagttggcactgaattccaaaatagaacacccaaaaacctgttgatttttccactgggattatgttaaattttcgggttaacttaggggaaaaccattatttcatgatgttaaatcttactccatgagagagcatggtacgtcttttcatctgtacaggtctttttttatattgttcagtagcaatttaaaaaaatcatccactatgttcaatgaaataaaaggccagatttaaaaatttggcaaggagttgaaaactataaaaargaaccaaataaaaattctttttttgcccccataaggcagaagaaatacaaattctacaactgaaaaaatataatatctgatattaagaaatcaataaatggtttattatattagctacatttgaagagacaactaaaaaagaaaaatattttcaaaccaactcagaaacaagaagatggaaaataaagaatacaatgctatttatatttatatataatagtatatataatacacaagtttaacataggactgcatttgcagaatagaagagagataatggggagatagcaacacttggagaaaaaataacgaacacttttttatttaaagtgcctaacttggctgggtgtggtggctgacacctgtaatcccaacactttgggaggctgagatgggtggatcatttgagcccaggagttcaagaccaacttgggtaacatggcgaaaccccatctctacagaaaaactccaagaaataaaaaacaataatcatctgagtgtggtagcacatgcctgtcgtccttgctactcaggaggtgggggtggcagaattaccagggcctggaagtcaaggctgcaatgagctgtgatcgcatcactatacttcagcctggttgacgagtgagaccctgtctcaacaaataaaaataaaaataaaaataaaaatgcctaacttggtgcttggcactttctaaaattgacacataatatttgtacctgtttatggagtatatgtgatattttgatacatgcatacaatgtgtgtaatgatcaaatcaggatatttaagatatccatcatctcaaacatttttctttgtgttcagaacattccaaatctagctattttgaaatatacaataaattattaactatagtcatcctaatgtgctattgaatattattgaattccatctaattatatgtttgtaccaattaaccaatctctacttattcctcacccccagctcccaccaaccctttccagtctctggtaactatcattttattctctacctccatgagatcaaattttttacctcccatatcgttgtcaatattattatttttcccaccctggctcctaatgaaggatttattgacaatatcactggaatctaaatcctctaggccattttttcaccaatgcccttattttcttagggcttttttttttcttaaatcaacagttttattgagatataattcccattctataaaatttcctcgtttgaagtgtacagtttaatagcttttagtatatccacagaagtgtgcaaccatcaccataataaattttaaaacattttcagcagggcgcagtggctcacgcctgtaatcccagctactcaggaggctgaggcaggagaattgcttgaacccaggaggcagaggtttcagtgagccgagattgcaccactgcaatccagcctgggccacagagtgagactccatctcaaaacaaaacaaaacaaagcaaaataaaacgaagcaaaataaaacaaaaccaaaacccaacaattttgaacattttcatcttaccaccctgccaaaaatccctgttctccttagccatcaatcttcagctccctacccacttctaaccatgaatctattttgtagatttgtctattctcgatatttcatatgaatgaaataatataatatatggttccttgtgactagtttctttcacttagtatgtttccaagttcatccatgttttggtatgtatcagtacttcattcctttttatcatggaataatattctgttgtattgatatactacgtttcattcattcatctgaacatttggattatttccatttttgtctattataataattctgctatgaacacccatgtatacgtttttgtgtggacatgatttcattttccttggatatacacctagcagtagaattgttgagtcataaagaactctaggtttagctttctggggagcttccagattattttccaaaatggctgtgccattttacattcccaccagtaaagtatgagggttctaatttttccctgtcttcaccaatacttgttgttatctatcttttttattatagtcatcatagtctgtatgaagtgatttctcactgtagttttttcagtagtaattaaaaaatttcctacctattttagcctaaaattactttcctgactctcttcaaggagcctgccagagaattctctctctcgtgctgtctcccttatgcctgggcataagctctgataatgccctgtctgggaaaactcttttggccttctcaatttctattacattgagagcccaagaacccatggtcagtaacaggccaatgagaagcctcctgcattagtctaggtgaaggataatggtggcttggaccggaatagggtggtagtcatggaaatggggagaatttgacagactagatttattttggaaatagaactgaatctgaacagattgaattgggcagggagcagggaaagtgaaggggaaggaagacaccaggtttatgccttcagcatttgggtggatgaatggatggatgaaaggatagatggatgcatggatggtggttggatggatgagtggttggatgaatggacggtcaaggggtgaatagatgggtggatggaaaatggagagatgatgaactgagatggggaagactagaagtggggcatatttttggggaaagacagttttgcaatacgttaagtttgaggtgcctcagagtcataagagaggatttgtcagaaaggcagttggatataagattttgaagctcaaaagacagggagggcctgatggtatgtttaaacctatacggatatcacataggtaacatttcaagcctaagaaatgggccgggcgcagtggctcacacctgtaatcccagcactttgggaggctgaggcgggtggatcacttgaggtcaggagttcgagacaaacccagccaacatggtgaaaccccatctctgctaaaaacacaaaaattagtggggcatggtggcacatacctgtaggcccagctactcaggaggttgaggtgggagaattgcttgaacccgggaggcagaggttgcagtgagccaagattgtgccactgcactccagcctgggcgacagagcaagactccgtctaaacaaaacaaaacaaaaaaagccttagaaatgggcaatgccaccaaagcagaaagatgaaaggagggcaatgccctgaggtgtgccagcattggaggaaacaaacagccagagatgtaggaggaaagcccagagaaactgtgagctgcaaggatgaagtagtaacaaataaaatgccaccaagagaaccagaaggacgactggaaacaaataaacaagaaagactattgcatttagcaacgtgaaaacgttggattactttttactcagaaatcaaaccccaaggatagtgtttcccctccctacaggggtttctgcaggtccctttacacgccccccttctacttctttaagtgctaaaagtgattaatttggggtgatgttttaatttctattctttttggcttataactgtgttttttcattctttgcaacaacagatagtatgttgtaatagaaaaatccattgtggtcaatgataacttctgcctgttcctgggcacagggggcatcactattagtgcctgttcctccctccctactgctgataaggaaacaggggcaggaataatactaataatttgtgctactttttctgcatacccttggccttattctggtctactgagctgggagcttgtctgaggctggagctctattgtctgaatccaggggcagaaagaactgagggctcttttacggcatccacctggaggctgcctgcaggcttgggttgctaagtgcactgcttaatttagaagcgccttttatcctggctctcttgaccagtcaaagttgtggtcgctgttttctacaaggactggggaaagaaagggtggaattaattaaacctggaggaagggactttgaagggcggagctaaggtcaaagaaagaaccctttaaataaagggcccacactggctgccagggagtgcgcaggactggcaagagggaagccgggctgctccacgcctttcacgccttccacctcctgcgtgtccatctgtgagaaggagccagagcccaagggagatgatggagcctgaggagtacagagagagaggtgagcaacgggcatccctggccctcttccctgctgctactcctgcaggaayggctgctggtgggtggcccttagattstggggtgacatttgatgggagcattagaattgccttctgagagttggcaccagcaacatttttttttctgcgaaaggaatgtgggatcagagtgtaaaacttttctcaaccactctttcattctccctctcatatacccactctcacatatgtccacactaccgtgccttgcttttcctccccactttcccacaaaattgaggatttggatccctgagccactagatgggaaaaggggattgttcatattctgaaatagaaaaaaattttctcaatattctgtaatcactgcaaatcctttctttcttaacattcattccttcatgtgtgaatctatcagcagtgttctttcatttagtcattcatttcataaatatttagtaggtgcctactctgtatcaggcaaaaccaagtggttatccagttctcaggcatggatctcccttagcaggaaagtaggtagttgcttaaaaaagaatcttgaatgtctatttctataatgttttatatcctcctactcactaattagtgtgcgttagcttattccattgctttcctaaggcactgtcagctgagagcaagttcctgtggatatttatcttctgagtggaacacaaatacatttagcactgttcctggatcagtggagggttaggtctagagctctcagatctctggtggggccctgctggagaagaaccaggatgtgagagsgttgaaggggagcagaaggaagatagaatggtgtggaaatctacctttgtctcataagttttgtctggggttggttctgttcttaagaactttgcataagctgatgcagaggggagaaactgagtcccctctcctaggtaaaagcagcccagggagtactaaggaatggatgttgagacagacaaagagatatgtacacacacacacatgcacacacagcaacagaggcactgaagactgcaatctgaaagaataaataatttgcaatagtttcagagtgttcaacttgacttttttttccttccttactcatatgttcattcacttgatacatttttttttagcatctaaaaaatatcctaagcactgaggtgttgatggaggcagcaggagggagagaaagtcattaagatttggtgccacatttcccaggccagggcagggggcttggtctggatccatggttgtgctttagggattctgtgagcctcagaaattatacacaaagttctgtgtatatgtaagcctacagttttaatcagattcttgaattaagtcctcatatgagtccaaaaaagatgaataataactgattcaatggggatggtgaaaaaatagatttttttgtcctttatcggaactgggcatggaatctttctatctgtgctaacagatataactggtgggtgtgtgtgtaacaatttttggatacaaagagctatagagtttctattgaacctataaaatagttaatagatgttctgtttctgagaaggaaagaaaggtaggagagacaatcaaaattgaagtggataaaggaaggggaaagaaaatgaaacgtttcactttggcgctagagttttgtgctttggagattttcctttttgttcatttgctcacttagaaactccctccatcattcattcactccctcactctttttttaaattctgaagataaggtcgtgcaggggatcagatcctaccctcggcccatgaatctgtctctctcttttttttgagtccaggctggagtgcagtggcacgatctcggctcactgcaacctccgtctcccaggttcaagcgattctcctgcctcagcctcccaagtagctgggattacatgcgcctgycaccacgcccggctaattttttgtatttttagtagagaggggtttgaccatgttagtcaggatggtcttgatctcctgacctcgtgatccgcctgcctcagcctcccaaagtgctgggattacaggcatgagccactgtgcccggccaaatccrtctccttctttaccaagtctcttggcccggacctgagagggatgggcacaaatcggtcaggcccagtcaggggatttcagcctgatttctctatgtcacttctagggagagagatggtggattacatctgccagtacctgagcactgtgcgggagagacgtgtgaygccagacgtgcagcctggctacctgcgagcccagctgcctgagagtgctcctgaggaccccgacagctgggacagcatctttggggacattgaacgaatcatcatgcctggggtgagacacagtgaccacaagggcagttctggatttcagggcacagaagggtgggtggtggcctggagaaagacctgctttgggtcagcttgggatgagaatgcatccttcagccacttggccaccaacaccccagcccatctgctaggcatgtggagggcaggactttgactggtattaggtttctttttctttytttttgcccagttgtgccatggcatgaggtttctgatgccagggcagggctggccagaacacctgcattccagagcacagcctggcagaagtgtggaagtctaatgggatgggtggagaagtgaacattttgtctgaggggaaaggacaactgtgtatagtaagacaggggagaggaagctggtggtagtgcctggccctgacgacggagccagagactcttctrtacagtgtctgagaccacaccaaagagaaggaaggaagtggggaacacatcctggcaaggacacgctggtgaccaggttgcgttggcccaggaaactgagtgggccctggcaacccctcctgtcccctctgaggtctggtgattgagctgcttttcaagagcaagaagggactttccctgaatcattgatactttccatgatggagggtgcagcctgggatagtgctggtggggccaggaagctgatggaagctggctgatgcatgggcttgagctggagcctgccttgatgggtggtggacacccctgaccactggyggtgaggagctctgccatggtgctcatgctaaagtggcatcgactcccttcctgtggcggggctccctgccatgtgccagctctgtgctggccacatgacatgctatctaatttaatcttcccagtggccctgttttacagatgaggaaactgctgatgctcagagaagttaactgtcttgcccaaagtcacagaattagtacctggtagatccaggattttaccctagaccagtcttacttcacaggctgtgccgtttctcctacccyctgtcacctctactggtgggtgcctgaatgtgcctggctaagcctgggcccctagcattgcctgtctggctccacacccccacacaagctgtgtcttccctctccctgcttggggcatttgtgttctgaaccacacatgtttagaggctcttcctgaggccagcttgaggtttgccttcatcattcccaaagaacttttgacttcaatgtgacaaaaaggccaggcgcgggggctcacacctgtaatcccagcactttgggaggccaargcaggtggatcacctgaggtcgggagttcaagaccagcctgaccaacatggagaaaccccgtctctactaaaaatacaaaattagctgggcatggtggcacatgcctgtaatcccagctacttgggaggctgaggtaggagaatcgcttgaacccgggaggcggaggttgcggtgagctgagatagcgccgttgcactccagcctgggcaacaagagcgaaactccatctcaaaaaaaaaaaaaagtgacaaaaatatgcctagaggcaggggtgggaaaatattcaaactcagaaagtgatggcaattttgacttttttttttttttttttttgaagcaatagagacaaggtcttgctatgttgcccaagctggtctccaactcctgggctcaagtgatcctcctgcctcggccttccaaagtgttgggatgagaggcctaagccactacgcctggccatgagggcaatttcatacaaagccactcatctctttgaccattcagcctatttcacaagcattttttgaaaatgtcaatatcagtaaggctttacggaggctagatcctgataagattatctcctggattttattctgtaaaatgtaatctgctgaggggctaactgtaatctgggagtgagactgaaagcaactgtcagaagaggtggaaatgagctgattcatttgatcaagaggaattccagcagttgctgtgggtatggtcggtgaggctcatttctggaaagaggtctgtttgtttttgataagggctcttctggctattttatcttatttatcttacaagaacagactattgtctcttgatagagctaggaggtagaagcccttctctggggtttccaaaatactgtcactaaggacagtgataatgatggtcaaatctctcaactcatctctcaggccacaccagcctctgagagctggcctgaaagcagttggccctttgcttactcattttgctcagtgcctcattgaaaactgaattagtttttctcttcctgccaccacctagaaaataagagaagaaaaactctctttcccctttaattccaacccyggttagacaatcctcatttacttttcatgagagagagagagcatccccacgggaaaagtcaggacaccaccctgctcgggtgtctgggcttctgcctcattgcggtcacctgtccctatggggtatgtgtgaccacagggatgtggcctctctctgtcagccccagttctcgcctgcaaaacagagataatgtgtaggtcctaccccatagggtcctgtgaraagtaagtaagagaaggcttggagagcaggagatgtggttattaccgatcatgactcttacatggtgaaaattggaggaagaggtttgattctctgagtcaagtcaggatatgtgatgtgtctgtcacccacatgattagtttaccgttaatgttagagcttaacatttcacacatttcttgcccacgcctccacccacacaacaaccctaggagacaggatttattttacgatgagaaactgaggttgagggaggtgcaggagaggctyctggtcttatggggtctgtactgtaaacactttttgagacctccttttgaaaaacaaaaaagaaggaggccggacacagtggtgcaygcctgtaatcccagcactttgggaggctgaggcgggtggatcatgaggtcaggagttcgagactagcctggccaacatagtgaaacactktctctattaaaaatacaaaaaattagccaggcatggtggtgggcacctgtaatcccagctacttgggaggctgaggcaggagaatctcttgaacctgggagccaggggttgcactgagccaagatggcgctgctgcactccagccctggtgacagtgcgagaatctgtctcaaaaaaaaaaaaaaaagaatgaatctcaaaagagacccacacaaatggtatgttggagcttaagttcattagcttcatggtaaatctacacggtcacacagctggttagggactgaggtgggatgggaacttgtgtccttggacttaattcttaggctccttatactatacacactgtccaggacaaggtccttgctcttgaaggactctaagtatgtgtggacagtaaagaacaggatgatgccctaagatgttatcaaatgagtcctcagtagagtgaaacatctagaattctagagttctatcrctcagggaagggatcgaagggagctgtgggagctgggggagagttcgaggaggaaatgaatatttagtagctttctaagaactggcaggttttggaaggtcatgtctttatagagagtgcctttctatcaggggacacagcattgctcaaagacataaatgcagaaaggaacagggcatgcttgcagagcagtgagatgaggagagatgagataatccatgaggccgatgaaccaccagggctgcttctgagttctgatggggggcccttcctgcccactcagctcctccttacatcmggttttgattgtgggctcagggcttagcctggaggtcggcctcccatacgcttggtctgggctctcctctctaccgtctcctttcctcactacattcccaatgtgatgcttaaggacagctttgaacccattcacccagaccctctgagttgcatgctcagggagctcagtgctccataaaacaaaaacaaaaggtgccttttgcaagaaactggatgaaacaagtagtctgcttttctggagctcacagtctgcccttccttttttttttytgagacggagtcttgctctgtcgcccaggctggagtgcagtggagcgatcttggctcactgcaagctcagcctcccgggttcacatcattctcctgcctcagcctcctgagtagctgggactacaggcttctgccaccccgcctggctaatttttttggtatttttagtagagayggggtttcaccatgttagccaggatggtctcaatctcttgatctcgtgatccacctgcctcggcctcccaaagtgctgggawtataggcatgagccaccgcrcccggcctgcccttccttttattgctgggcaggggcggcatgaggggtaagtactggggactaatgtgaataccacccagaatcccacaactgggttactgtagtgattttccttttgcatatttccttctggactttgcatatatgaaaaggctccactgatgatctagcataggacatggrccacattagtgacaagaacaccagtgaacaagtctgattttcatggagttatgtcacttatttctgcttaaaagtgtcagcccatctctagagtgacacttcaccttgccagagatggtctctggagaaagaaagcctgctggaaatgcctcctggtgmcaactctgtgcatgctctgcctccaggtggtacattggcagagcccccatatgcacgcctactacccagccctcacctcttggccctccctgmtaggagacatgctggctgatgccatcaactgcttgggattcacctgggtgagtagcaacggctgtaactactcgcaatggggaacgtagcagggagtggtatcctagggcagacatattttgtcttggtttctgaatatggctccacaataaatattaatgagggctatattctttaagcttacgctttattttaattttctcatcacatcctttaaccctatggaatcacgagtattgatcccattttgtaggtgaagaaatcgaggcttaagcaacttatctcccccagatcacacagctcatagagacacagataagacttggatacagatctggttattgccacagtttgtgaccttacctaagcaatttgatgcctattgagtcaccacttcctctgtgctcttgtatttgagtagctggagatatgtcctaagacttcccttaataaccccttaagcaccactcagctttaaatggtgccaaaagccttccagaacatctttttattttaagcctgaactcctatgggtgtgtgggtgggtgggcsggggtattcatatcttttctaggaaaacatccccctgggcatttgaggacttctcagctatgtattttagcgacttggagaaccaaatccaagccaaccatttctagggctgtttctccatagagccttggagaattcgcctcattgagggcagcatgaatccaaaaccccacattattttctcttttggttgacagagagtggaccaggagagaggcacgtggcctaacatgaccccttctccagaaatgttcccattgacaccatcaggggcagacatgtttctggagctcgtgggggcacctcagtgccctggggctgtgcagtttgaagttccttttcctttctcaggcatccagccctgcgtgtacagagctggagatgaacgtcatggactggttggcaaaaatgctgggacttccagagcacttcttgcaccaccaccccagcagccagggcggaggcgtcctgcaggtacctcccttggcaaagcttcacctagcwtggsggctaagtagcgaaagacaagccaaaccctaacctggcaattctcccgttctccatggagtttcccccacattacccacaccgtcatcaccaacagcaccatcatcacagcttccacctctactcccacctcagcttctgcttcattcacatgtactgctacttcctttgaaagaaattaaagagccaacacatgatcacatttccagtatgacttgattcaggtttcttagtctataatctgacaattcctttttggtgtcccattttgtatctcacggtaaaaggggaaaggagaaggcaaggagaggacttctctttctctccctgctaggttcaggagatcccttgcagtgagagcaattaacagcataaactgattaacggtatcctctgaccctatcttctggatacttgtcaaattatggttcttcaaatatttctttttttcaagagtagtgccatggagtggagctttctgggtgcctcccatggaccacacacattgttaggtgcttttgcatctataaatccttgacgttcatgagggcttggttctaagacctttgagattcctcagattcttgaattctactttaatgtatgtttcctggttttataatctatgagacagagataataatactatttccctcaaagagtatatgcaaggattcaatgaattctttttttaaataaaaatcgtggctggacatggtgactcacccctgtaatctcagcacattgagaggctgagacagatggatcacttgagcccaggagttcaaaccagcctgggcaacatggtgaaacctgatctctccaaacaaacaaaattagctgggtgtggtggcatgtgcctgtagacccagctacttgggatgctgaggtaggaggattgcttgagcccagaagattgaggctgcagtgggctatgattgtgccactgccctccagcctgggcgacagtgtaagaccttgtctcaaaaaataaaaaaattgccatgttgctctgagatgagaaccaggaagttcactaggtcctcttgctagctaagtgactccctctctcactgcagccttgcagcaagattaaaatctgaacctcggaagaaagacaaattgcagcatgttgtggacattttggattgtcagcaaatagttacaacttcagatatcatatttgggagaacatgctaaatgtctgcggtacatgatcttgcttttcatctgattatctcaggaaccctgcaggtgaatagtaccattccccaatgttttgagataagagcactgaagttcagagagattaaataatttgccctagcttacacagctgataagcrgaagaacgaggattcaaactgatgcctgtctaaatccaaaccatgctttctcctgtatcgtcagccatgtgaacttgagttagtcccatcacctctctgagcatcactctcctcatcttagtgtgacaagaatcataattatctcaaagaggtgttgtgaggagcaagtagaatgccagaaagtgttttgtaaactatgaattgcaatacagatggaaggtgttgttaccattattattatttttaaaaacagggcctggttctgtctcccaggctggagtgcagtggagccatcatggctcactgcagcctccatctcctgggcccaagcaatcctccaacctcagcctcccaygtagctgggactacaggtgtgcaccactacacctggctttttgttttttgttttttttgtagagacagggtctcactatgttgtccaggctggtctcaaactcctggactcaagggatcctcccaaagtgctgggattacaggtgcgagccactgcacccagctgattattattattattatgctacatacttctttacataaatagctttctttttatggagtaactcccaggcacttaatatctgtgggatctggtccacaccactctccatgacagtgtctgccaggcatttttagcaggattctatcagctgtaggtcacttgaagatttcaagaagcaaagacatcaaagactgggtgaatgaatgataaggaaccataaagactcctgtgaagttcctgaggtggccccgaagatttccacaatcatggccagagcaaaatcctacccaacccttgtttggataatctatactcccatcctgggaagcagttaaagggatgctctccatttcatagacagaaaagagtcttctggaggggaaatgttagcccaaggtcacaagagctattgacaactaaatgggcccaagtcaccagcctctcacacaggccaggatcctctcttcctggggactcaaactccatatccatttgtgtaataagctgagagttcttcttttaaatatgttttacatggggagcaaacacatccaggagggacagaacattctctttttggtttctgtggcctctgtaatagagaggctggtattaggtgcaaacttattttagaaggcagaataggaatgaaagttggggagggacatgggcaccctgggcaggaggagctgtgtatttccttctgtgaatagctatgacacacacatacacaaacacatacacacacasagasagasasagagagagagagagagagagagagararaaaactagaaagcctggggaaatttggcaagagaatacagaaaggctgccatgataatccttttcccctgcagagcacggtcagtgaatccactttgattgccctgctggcagcaaggaagaacaaaatcctggaaatgaaaacgtctgagcccgatgctgatgagtcctgcctaaatgcccgactcgtggcytatgcctctgaccaggtgagttgcccgacgcaggacagcccttcgggttggtgcttggcttctggaatcttggtccttgagcaatttttttctagacgtgagtacgctggggttctgagcagctcagacatgggagcttgtctccagcaactgtagggaagacaagcttccaatgatcatatttggttcccragtcttaggcttcagcagtttctggggggtgatcattccaggatgactctttgctgacaggtttctgtggcccttctaggctcactcctctgtggaaaaggctggtttgatttcccttgtgaagatgaaatttctgcctgtggatgacaacttctcactccgaggggaagctcttcagaaggccatcgaggaagacaagcagcggggcttggtgcccgtctttgtaagtcaggatatatgcctaagcttagaatgatagaacttggatgtgaggaaggaattttggcagaattcaggtaagtaacatgctgcacacaaaagcagaaaggtcctcccatacagtattttacacatcatgaggtgctatccataggtgtgttatggaataaattttgtgggtcataaccagcattaaaaagaaatatagtataaaatattagagtgcacacatatagccagagtatgtattgttttatgaaacttttttttcaaatacacacgtatacatgtactagattgttatataaaatgtgtttcttacgagccatggtaaaacacagtctgaaatatacactgttctggtgggatggatgggagtagatcacgtctgtggtgaaatctttctcaggccaaatgtgtcacacgagcccaccctcctgtgttaacttgccttaattttcccctaggtctgtgcaacactagggaccactggggtctgtgcatttgactgcctgtcagagctgggccccatctgtaagtatcttccctctgtggctaggaagacaaggaatacatttttaaatgtctcctaaagcaaggacctgaaaccagctctatgggattattcttgttcctctttggtcaatgcagagacatgggaagaaccaccaaaggtcatgagggtctcttccagggatccctggacattgcctttcccagtggtgtgacaagagttagaggtggcctaccttgcctcctgtcctaggaggcgacagtaggagagccttcggttttctcatcctcttacttgtatgttgaactttacttaatgcaggctatatccaaaatacagtgtgaattaggctagaatagaaatgctttctattctaccttcagaaaaggaaaagggtagggtaggggaaatcatgggagagattaaaggcagagaggaaacccagatgggactgtttaatccccaagcaagaaaccactaggaaagagagataccttccctctaacttttgtattcggtgcactgacattgctctctgtgctggtgggaaattgatttctgtgccaggatgttctaggctgaggccaagagggtgctggccctttacccagtggaagaaaaaggcaagggtgaggctttgtagactttcccattmggwggtaatgatgcctccttcagccccacttcttcaaactgactccacctgctcccatctccacacccctccgtttctcatttagccaaagcacatcatccttgcagcccaccactcagcttggccaggtgygagacatctttccccacttcatacctcccctccggccaggtgatgtttgcctcctcaggtgcccgtgaggggctgtggctccacatcgatgctgcttatgcaggcactgccttcctgtgccccgagttccgggggtttctgaaggggattgagtatgcygactccttcacctttaatccttccaagtggatgatggtgcattttgactgtactgggttctggtgagtgtagcagcccagctccgagcacgcaggaacgccttgcctcctctggagagacctcagccactaatgcccatttggaaacccacagggtcaaggacaagtacaagctgcagcagaccttcagtgtgaatcccatctacctcaggcatgccaactcaggcgtggccaccgacttcatggtgagtggccagggacgggcagcctggtgggctcgggtggccagtgggaactgtaggcgtctgaccccccaaaatctgtacrgtggctcccttcagaaggcagcacactatgagctcatctcataatactgccaatgcataccttggtttctaattgtgcctaagtatatagaatgaaacccagaaaatggttaaaaaccctagaaaatgagaccagcctttgaggcagtgtgcacatttcctgaatatttgtggcattttttaattcccagaaatgctcttcctaccacaggtggaccagttccttctgcctccatctcgggtcatcttttttgtttcttacccagcagcagggcagggtggagaatttccctggtggggaaagagctttcttgctgaaatcgcttttgtttttttgtccctgacagaggcgctgtggggcagctctgtggtagtgatgggctgcaggacttgtgtgaggttctggaagcctccaagcattcctgactttcccaactgactgcgcctcaactctctaactcactctctctctcttttcttttgttttctttctttctttctttctttttttttttytgagacagagtctcgctctgtcaaccaggctggagagcagtggcgccatcttggctcactgcaacctccgccttccaggttcaagcgattctcctgcctcagctttccaagtatctgggactacaggcgtgagccaccgcgcccagcaaacctcaactctcttgattccacatcctcagccagtattttgcctgagggaaacgagttcttaacaaattgactccgcagtttgaggatgagcccttcctttacttgtaggggagacagggatgtaaacgaatgtattacacataacctggccaacggaggcagcagagcagagtgggggcaagcttggtttggaattccattccagcagtggccctttgggaaactaactggacctctctgagccttgctttccttatctgtaaaatgagaatagtggcattgattcatagggtattgtgaagcttaaatgggaacacgtgtggatcacctagcaaaatagccgtgtggcaagtgctcaatatatggtaggcatagtatttctgaaagctcttctttgaagctgcagagatttgttaggacagtggttaggcatgtaggtgctaaagccagatggcatgtgttggagtcctggctttctgtttactaacttgtgtgacctcgggcaagtgacttaaactctgtgtccagatttcctcttgtgtcaaatgaggctgatgaccacagttctggcttcttaggcttgctgtgaggattatacaaattaatacactgaagtgctgagagcagtgtctgacccctgtaagcatccttccttgtgaagagatggttttatcttatcttcttggacaactgaagtgtcttgcccttttagtcttaaaataatagcttcgtcatcacttgattatactggctattctcccttggaccagtccacaccctctttagatatttgaagcttttggattagaattgcagcggtaagcctcacggcttactggtggtgacagaagaccctctagaggtaaagaaagaaagaaaaataatggttctttatctccactgctctttctggtaggttttcagagatttttaatgaaaaattaaaaaaattccagaacagcccaagggtcagatatctttagggataactgtaggtttgcttcctgagtgtgaattgatgcccattctcctatgagtgtatttgggtcatcataactgaggagcattatattcacccttgcccttttgaatttcatgttaccgtttaaattcatttaccacagtgcctcaggatcttcccggggttcattcctaggagtytggagattttacagtgctctctgtcttccagataactcataaaaatgttagagtaaactcttcccagccctgctctggggaaccttattatttttacctctccacccagaaggcactgccttacacttacccttcccccacctttaatcctatggatttgattttcaagtccatgaagaaactcctagaaaagtgaagttgctatctttttcatgatcctgagggtcctcagagctactctcacctgggcccaatgtctttcccacccaggtggctgcagctttgaacagaagctcagtcctgctctgagatgagccagaaacagggcagcatcccaggagagaagacttaggtgcttaacccctggggtcctggaatcacctaaaatcagggctagattctctgacagcggagaagctccctgttttctgcctctcactggacagagagcaccagtggagggagcgttaccttagccttggcaagggagccctgcaaggaccttacaaggacacagaggaggctggagatgcctcaaggtaaagaagagccctgtcagsctttatacgtccagattttttgatccaacagaaaatgttggctagaaccactctgctgagtcagcatggatcagttttggaatagtgacaagaaaaggagcaactgggaataaggaagattgtgaagaaatcaaaataaaatcacctctgcctatcctggtttatttgctggtaaaataaagtagctctctctatatatgaaataaattggctataactatctggaaaccagaaccttttgacagatgatccctatcatccgttcattattctcttggagtgtccattggacaagaggtggagttgacactttccttgttacagcaattttgttccattttcaggttttgatgccttctgctggcacaaaagcccccaagctgctccccagcacaacagagttttgcttggaaatcaaaggcttagtagttttctgctggggaaacattgtccatcaacaaaggggtaacatcccaactgtgcctggctcaggaaactggggtgaagggtgaaggtgaggacatttgtgaggatttgataatcttgtgtatgggcagataaatacgcagtgggacaaacatttatttttagtcaacagaaattgtggtagaaactttctgacgtttgagggagatgtcattaggaaaccacgtgactcattagaataactgtaaatgttttccaaatcctctgctctattttcagatctgagaaatcagtctgaaattgatttggaaattttcagatgtatggtgactgcaaccttgaactttaagctctgttgaatttggccaccaggagcaaagagtcaattttcatctaacagcggcagaaatttgggtgctcatttgaaatctgacagctggagtgatggctctcagatcacaggaatctcacaggaaaatgaacaaggcagtgtaaggttaaataggggtcatcttggctctagacagaaatgctactgtgatttgtagctcacattttaaaataatctaaatagccaacacctactgacaacttcttctgaggctcttggcgttctttgtcctcacaccacttgcccgggaggtgcaattggttctttatgtcccggactgatgagccagtgaggtggcactacccaaggtcacacagctagtaagtggcacagctggaggcgaaacctaggtctgcagggctctagtgtctgtgctctaactaccatactttacattttgggaggaataaaaatagaactttattttctgctattcaaggaatawagattcatttagagtaaaaatgtatttcccttatgttgagtttctgggccgggatgaaatgtttaaagcagcacttgaaagcaaagtgcccttctcattggttcagggtaatggacttgacttccacttgtctggctctcagacaagtgactattggccaccttcatcagtgatttggtcacacgatggggcaacccttggggagcttggcttactccttagcaacagctcccagagtcatggtgacatcgtccatccctggagggctgggcaggcaacagataatgcccagaaatgcccgagggagtggggcacccttgtctctaaccttgggcactgtgttcctttgtttctagcactggcagatccccctgagccgacggtttcgctctgttaaactctggttcgtgattcggtccttcggggtgaagaatcttcaagcacatgtcagacatgtatgtagcatgctgctgtgggggctgagcctgtgttcctctgttttctcatggcgaggaaggctggtttctactttgcagatctgcctaggagacttgcggtgtgtggttcaggtgtctgggcctgttcctcagctcctgggacttgattctctttgttaaccagaggagcgctgagcacaacatgccctgagggctgcctgatgcctgtcctctgctgagtgtctcaccgttccccttgctgtcactgagcactggggagggttggccccagagtctggtttgcaggaaagagaaagagaaagtaaatcaaggggaagtgtgtgtggccagggtaggatcctatctgctttggaattacctcaatggtcacagctggctgaatattttagcactattatgattatgcctgaaataaagctcccctggcttggacaggtagacctaccaagtctggaacaaacctccctgcatcaacaggcatttattgaaggcctattttgcttaatttatttctattcaattcaacaattacaaggtattgtgctaagaaagggacacagaggtaaatgagacaggtgcagcctctctcccatgttcttcatggaagaagcgggacttaactaagaactctggccactggcattgttctcccacttctacaagagtccacatgcaagacaaagccattgataaaagtagtgggggaagctgaagacactgtcctttctgcctatgtgtgtctttgtccttccacctttcctctagggaattccttcttggttaaacaaacacaaaccaaaatgaagtggtggaagcggtaactatgattttttttaacatttaaaaaaaataattattatgcttacataataattacgtatatatttatggggtatgtgtgaggttttgatacaggcatacaatgtgcaatgatcaaattagggtaactgggtatccaccactcaaccatytatcatttctttgtgttagaaacattctagttccattctttaagttagtttgaaatgtacagcaaattatagttaactatagttgccttattgtgccgcctaacattagatctatttaattgtatttttgcgcccgttaactatcacctctttatcccccattccctgctacccttcccagcctctgccaaccatcattctactgtgcgtctccacgagctcagtttgcttactttttaactcccacgtttgagtgagaacatgtgaaatttgtccttctgtgcctggcttattttgcttaacataatgttctccagtttcctatgactggttttaatgttggtaattttacctttgtaatcaccactggttgtttaccaatgagcagctgccaccaacaatattgaggaactttaggcactttgtgctgtttctagaaatgcagactcaagactggagggttgtgggcggggaatggttggtggaggttacaagtaattaggaacatttttttgcttacagtttgggactggatattcaatgtgcagatcctgactaacctcccttagcacttctgtttgcaaatcaaacccctgaattcctcctattagcaaccccattgcctaccatatgaggcccacactcctgggcctggctttcaaggacttgacgattagctcctaccttagcttgggcatttcatcgacccatccagacctcatgctcagtccatctctgcaccttcacccgtgtccttcacctgaactaccctctcctctccaaatgttgtgaatggattaaattctgcttccactagaagcttttctgcctattccatctgttctggtttctgcttcattagcattcctgtgatcacctactcaaacacctttacaaaactgtgctcaaagttcttccaatgtcccacaatagaagaaatggaattaaaataaagttgtttgatatgatttgattttatctcttcaacttgacggtgatgataattattgacacttgcgtaatgccttcaatacaaaaataaattctagttcttcattagatccttagcacagtgcctggggtggtcactctaacctggcaaggctcagagggagtaattgccctgcttgagggaagaaggcccgggactttccctgaagcctcccaattccaaatcctttcttcatagttctgggctgctttctactacactgagctcttggaaagttatataaaattaaatttcatatttctgtgttacagagaagtgctttaaagaatggatttttagttctaccctttactgtttgatgaccttagacaaattacttaacctttctatatttgtctgccttatttatttattgttatttatttttgagatgaggtctctgttgctcaggctgaagtgcggtagtgccatcagagctcactgcagccttgacctccccaggctcaggtgatcctcccacctcagcctcctgagtagctgggactacaggcgcataccatcatgcctggctactttttgtattttttgtagagatggggttttgtcatgttgcccaggttgttctcacgctcctgggctcaagcaatctgcctaccttggcctcccaaagtgcgaggattacaggcatgagccaccacccctggccatgccttcctaatttataaaaatgagaaaaggatactacctctctcaaattaaatgagataatatatatgcagcccttagcacagggtctacctactactcagttaagtactcaatgagtacctcttcctcttctcttcttccccttcttcatcatctccttcttcatctaattataataaattgtcatcatcatcaccatcatcatcatcatcatcctcatctcctatcacctacaatagggattggtaaacatttcctgtaaaaagccagatactaaatacttttggctttgtgggccatactctattgtaattacctctgtactacaagagctaccgtagacaatatgtaaacaaatgggaatgctgtgttccaaaaaactttacaaacacaggtgggggctatatttggccatggctgcactgtgcctgcccttgacctagagcggtgcagggcactggcagcagctctgctttcatgacctgtaaagtggggctttggaggtggcagtgctgcctgtgctctgtattctcctctcccctgacctctgcttctgttattgcaaacagcatgtgttgtaggagggataaaagcacagtgggaggagatctacctactgtcacttrtaccttgggaaagtcactttcccttggttccttctaaaaaatggaaagattgagctgggcacaggggcacgtgtctgtagtcccagctacttgggaggctgaggtgggaagctcaattgctcccaccatagcccaggtgggagttctgggctatggtgtgctatgccaattgagtgtccgcactaagttcggcatcaatatggtgacctcccaggagcaagggatcaccaggttgcctaaggaggggtgaaggggcccaggttagaaatggagcaggtcaaaactcctgtgctgtttgaaactgaccacgcaggggagaaaggggctctgagaaagatttggagaaactcatttcattatggtcaaaagacaggctcagggccagacatggtggctcatgccagtaatcccagtactttgggaggcctaggaaggaggatcgcttaagcccaggagtttgataccagggtgaacaacctagtgagaccactgtctttacaaaaaaattaaaaaatgtagctgggcatggtggtgcatgtctgtagtcctagctactcaggagrtgaaggtgggaggattacttgagctcaggagttcaaggctgcagtgagctttgattgtgcaacatgcctctgtactctagcctgtgtgacaaagcaagaccctatctctcaaaaaaaaaaaaaaaaaaaaaaaaaagaggttcagctaactcccttgccctctcttgaaatagagcagtaagtatgagaactaactgatagaattacttagcaaatattttattgagatcttctggatgcttggagaaatttttaaaaagaaaagagaaggcaagtcctgtccttgtttagttagtaatcctgggttaaaaacaaaaagcaaaaaaccccaggacatttaaaaagatggtatgaacttcagtggaagattaatataatacaaagcctttaacattttaaaattgtaacaaaatattcataccatagaatgtaccattttactcatttttaagtgtacaattcagtggcattaagaatactcacaatgtggtgtgaccatcaccattatttccagaattttttcatcatcccgagcagaaactctgtatccattaaccaggtccaaaacctttccatgatgggtggagacaagatgtgaaaatatgttctctatggaatgtcagaaacaggggatgaaaagggcatttggggtacagggtgagaagaggtttgagaggcaagtgaagcatgtaggcttaggatggggcagggccgccactagcccatatggcaacttgatgtgcactacaaacaggcatctcttcctttaggcacacgcagctcgcatgaggcacctggctgggaacgcagagcatggactgggttttggccctcacttgcccacttggccagtcaaggagctgtgaaatcaggagttgaggccgggttgcctggactgcaaagcacatgccttctgggttctggggctgagttgaaagagggccctgagatgagttctcgaggtggatcccatgtgacaggaaacagggcgccattggaaattttccagcttggaatatgagcaaaatcaaatggagatgacaatgaggcagaagccgcttacaacggctgtgacgggaagatggccctggtttaaaaccatttagcagtctgaaagtttatgcatagtctcttgtctgatgattaatctcagttctytttatacttgcaattccagggtactgaaatggctaaatattttgaatctctggtcagaaacgacccttcctttgaaattcctgccaagaggcaccttggcctggtggtttttcgtctaaaggtaataccatcttccaagcccctctgtgaatgatgtcttgtggtgctccagagcctctcggaaacacaaatgctgggctctggggatgctgacagggggtgcgatggagacttcacttcctttatttttcaaacagggtcctaattgtctcacagaaaatgtgttaaaggaaatagctaaagctggccgtctcttcctcatcccggccactatccaggacaagttaatcatccgtttcactgtgacatcccagtttaccactagggatgacatcctgagagactggaatctcattcgagatgctgccactctcatcctgagtcagcactgtacttcccaacccagccctcgggttgggaacctcatctcccaaatcaggggtgccagagcctgggcctgtggaacgtcccttcagtctgtcagtggggcaggagatgatccagtccaggccaggaagatcatcaagcagcctcagcgtgtgggagccggtcccatgaaaagggaaaayggcctccatcttgaaaccctgctggacccagttgatgactgcytttcagaagaggccccagatgccaccaagcacaagctgtcctccttcctgttcagttacttgtctgtgcagactaagaagaagacggtgcgctccctcagttgcaacagtgtrccagtgagtgctcagaagccactgcccacagaggcctctgtgaagaatgggggctcctccagggtcagaatcttttccaggtttccagaagacatgatgatgctgaagaaaagtgccttcaaaaaactcatcaaattctacagcgtccccagctttcctgamtgcagctctcaatgtggactccagctgccctgttgccctctgcaggccatggtttagacmcagggccttcagccagagtctgaggatatacttcagggactctgtgaacccctcacaattgtatgccaactttgtgtgcttatgtgtacatgcatttttcttggggcgagttcataattttaatcaaattctcataggggttcatgacccacaataggatacaaacsaagagtttaagccagcatgatccagatgggttcakcagtctggtcagtgagaaagggccgagggtagacaggcagcttctgtggttcagcttgtgacatgatatataacacagaaataaattatgcttgtccctgaaacaaaacataccctgtgtcacttaattggctgctgaaacattgattaaccagtctgggagcttaaacatatgtactttttttgaagcatcaattatgagtcaggcactgtggctcatggttcataaatgaggaaaccaacgtttaggtcacacagctttaaataggcaaacccaggtctcctggcttccagtgaagcccaggctgtttccaccatgcagtactgctcaaggttggacctgaacaggagctcacagcccagcaggctgctctggtcctccagtacatttaaatgtttcctttctaggtttggaacttgtgcattttccccttattttcctggacccggtagtcaaataaaagctatgctcacaagtggcttgcccataattagttcagaggccaaacacataattttatttccatttcagatggtactttgataggttgtgactctgaaatgggttatgtaaagagtattaaagacaaacaaagctgggcattagttagaactttaaggatagatgttaaacagtaatatactatcacaatagggaaaagggtcccatgtgaactgaactcaacttggatttgtgcaaaggtgactaggcatttcacagcgtgaatgggagaatagggagaaggccagcctagacttagaagagtcaggaatgtgaaaaattacaaaaagcggaaagtggttgatgtgaaacccctctgggtttgctaactggtgctttttgaagtaagactcttaccctcccacagagactgggagtcagggccctgtgttcaggggttcgctggaacaaacagttaattctttcggcagctttgagttttcttaagcaggcactttaaggtgagctaggatcaacttagggatgtggccttgagctgtgagaaactgtgttagtgtttgttcaagtctttataggcaaaggttgaggcctagttgagaagggggctcggaggagcttagctagagtttggtcgagaaaagaatctttgttaagagtttaaagcttttttttttttttttttttttttttttttgagactagtgctttctctctttcccaggctggagtgcagaggcacaatcatgtcttactgcagcctcaacttcctgggcttgagcaatcctcctgcttcagcctcccaagtagctatttatttttgagatggggtctcattctgtgagtgcagtggtgtgaacacagttcactgcagcctcagcctctgaggctcaagctgtctttccacctcagtcccacgagtagctgggactatgagtgcacaccactatgcctggctaatttttataactttttacagagacagggtctccctgtgttgcccaggctggtctggaactcctgggctcaggtgatcctcctgccttggcctcccaaagtgttgggattacaggcgtgagccaccatgcctggcctggctaattttaaaaatttttttgtagagacagggtctctctgtgttgcctaggctgattgtgaactcctgtgctcaagagcatctcctgtcttggcttcccaaaatgctgtgattataggtgtgagccactgcacctggccaaaagctgaaaactagccacttgttctctactagtgatccctgagctttgctgcatactggaatcacttggaggtccttaaaaaaatactgatgcttggttctcactcccagaatccttgatctaattggtatggcatgggcctgggctttgggatttttgacggctccccagatgattctaatgtgcagggacatctgggaaccactgctttagattgacatgctactcaaagcagtgtgtgtgccccaagcactcactgcactccaagcactcaaagcactggtgtccccaagtgattctcatgcacagtaaagcttgtgcactgctttaagccagtgattgtcaaactgagtccacatcagtaacaccaggagggctttggcttgtcaaaacacagatgtctgggcctaccctctgtgtttctgattcagtaggtctagaatttttcagggtccaagaatttgttggtccagcaagttcccaggtgctgctgatgctgctggctcagggaccacactcagaactactggtctatgatggtactctcttcctgcaagtactaggtgagagcttagtgatgccaattagctgtgtgacttcagtcatgtcacttaacctcaggcctcagttttttcatttatcaagtaaagaggtttgactagctactctctaggattgcttttcgtttgctatagcaaatcacaatatatgtgtatgtatctagcaagcagatataagctctaattgatgtaaatttccaagagcaattgcaggcttgtgtgatgacaaggtgcttcttgatgctgggcctttcctggggactgcactttgagccacttgagctaagagctgagcctcagttagtaagggatgacctggctctgaggaactgagttacccactaagtaagtgcacatgttgtataactcaggatgtcagtgattccccaaatgtggcccccgtcccacagcattagcctcacctgggcatttgttagaaatgcaaactccaattctagtttggggggatgggactcagcactcttgtgctgagaacatttcttggtgcgtagcaggcacccactaagtgcttgtagggtggatgtatgaatgaacgacacatttagcaaattatctcttaggttgagtcactgcagttagttaaacctatctttttttttttttttttggagatgcgatctcaccatgttgcccaggctggactcaaactcctgggctcaagtgatcctcctgcctcagtctcccgagtagctgggattataggcacaccccaccatgcctggctaactttacccattttaatactgattctcattagcatccatttcagaggctgacatttcctacttttatccccaaattattttggtgcctatagcatcccatctatgcactgattacaggtttccaaacaatacatttgaaatcaaagccctgttggataatttacatggatatcagcttatttttttaaattcacttatattttcaaatgagaatgacttgtgcagatatttcttgggcacaatttcttacccttttcaaagagaaaaatcagtctttaaggtattatctctcacaggtgatggcttaaaattgtttacatacatgcaaacctaggggctgaggacattgtgggggtgtctctatttatctcaatggagctgtgttacctggccagattcagggaggtgtggggaagtggaagactgaggaaaccatcaggctgggaggcagagctgggcagggtgtggatgcgaggacctgggtctctgagtttctgactggaaggtctaaaacatgggtcaaatgagatcagggcaaccaggttctggttaatataacacgaatattctggccaacagtgtaaatgctgacctcttacccaaaaagataccccttgtgacacagaatgcagccactgctctaacatgacccctgctgacaaccttctcctttgacaagattccaggtaacacaattgcacaatgtgatactcaaaggctgtcctatctcccactacttaggttcacattctcctgtaactcaaaggcagagagaattttgcaaaaattcgcaagtgctgacccacaaacaataatcattctaattactggcaaaattcacaaaggtgcagcctatctagagttttctttagaccctcctcaagtcctcagtgtatattaagcactcaggaaatgtttattgttaggtataatgagtgggggcaaggattttggtcatgattcttcttaaagtcacccaaaagagtggagagagttaaaaaaaatatttctagtactctgttggggctgggggtggcaacacctctcatcatgtatcattgagaagtcctagaagtgtttgcctggggctttatggggactaaactgggggagaattagcacacattaccagctcctggtcatctgaagatgtcctctagggaaggaaactccatgacagaaacttctagagaggctgtggtaaacttgggccatgctttctggatgtgaactcaatgaccatgatgctcccatgcctaggacaagctctaggtaaggtacatgtcgtcttgaatgctttcacccatgacctgctcctggaattctgttgcagctcatacatgcagaggtaaagcaattaaacccaggaagggaggcagctgggtctaaggagaaagggcttatgtgaaagagctcctcagaatttcccaaagcctcccgtgccaccctaaaggtcctccggtctttgaaaagggtccgtgggcaggagactggctttggagtgaaaccagttgccatctgaggagtaggggcacatgtaagtgggactcgggtgctaactggacagctgggatttatctggcccagacacacattttgtttgggatgcatagaagttttaaaaattttgagacttcagatttcaaaaattgggagattcacatacatatctggatttgttttctttttaaaaagccagtcaaacttcgtagttgtgagagtgtgtatgtgggcggggggggtggttgtagatcaactttagtgacactaatgttaataagttctgatggatttctgttttctgaataattaaaaaattccagcaatacttggcctgtatttagctgactgaagcttagtggccgtccccaagtttaccacattcatttgtgacctgcttttctcatccacattacctatgtgaattctgaagacacttgagtttgcaacccctaaagtagctaaaatgtattgaacacctttgtttgtttgtttgtttgtttttttaagacggcatctcactctgtcatccaggctagagtgcagtgatgtgatcttggctcactgcaacctctgccgcccgggttcaagcgattgtcctgcctcggcctcccgagtggctgggattacaggcgcctgccactgcgcctggctaattttgtatttttttagtagagatggggtttcaccatcttggctaggctggtcttgaactcctgatctcgtgacccacctgcctcggcctcccaaagtgctagaattataggcgtgagccactgagcccggcctgaacaccttttgtgtacagaactctgatgccatagaattaggctcctgtaaggactatagatggcattattacctgttggataatgctacctatacacagtggacaggatgcctccgggtagggaaagttggcctcctcacattggagtagatttccattgtgttggccactgctgatctagccgcctcaccctaccatccctcaccccaccccccgttcccagccatttttacctagaacgtctttactcttacgaatgggacacctatgaaaagttaccagtgaggacttcaggctttggagtaattgacacaggctttgtatttagagtaaagtgaggaaagaacacagagacagtgccatctcacatgttggtgttcatttaatttactaagtattttaaaaaataatgccttccctccaacaagctcagtttgcaaatacaaacagtaggtgcacactgaaaaataataatctctaaatctttttacttgcaaagactcaactgttatttaaaaaagtctccctttacgggtatgcaaatttcctacaaaatttcctcacaatcttcaatcaaattaaagttggattatatcaagtggctgtccattcagtttctttctggaaatgttgagttatcctcctgggaatattcagagtttcagggttttagcacttatggcattatagatgtcctcagtcataggcacatacatttttgctgtgtcatccaagaaatacaaggcatctttgatgacagcagggttaaagccctcctccaccagggtcattttgcggtgtttaaaagttccag

SEQ ID NO: 95910 - DNA, 66181 bp, Homo sapiens
  misc_feature (1)...(66181): n = A,T,C or G
taacagcatttgcagtgacctgaatgagattagagactattattctaagtgatgcaactcagaattggaaagccaaacatcgtatgttctcactgacatgtgggagctaagctgtgaggatgcaaaggcataagaataatacaatggactttggggacttgggaagagtagaaggagggcaagggataaaagactacaaatctggtgcagtgtatactgctcaggtcatgggtgcaccaaaatctcacaaatcaccattaaagaacttgctcatgtaaccagataccacctgtaccccaataacttatggaaaaataaaatattttttaaattaaattaaaaaataaaaaacaaaataaataataaaatccaaaaaagagtacattgtgactgggatggagagtatgtgtgttgcagtgggatattgaaagaagagagagaaagctgttgaaaaaatacaaaccaaatctggagaattagcacacatattagcactagaaacaatgatgatttcatcaggagttttccctgagttagaattcaacacctaatcaaagccattctggtcagaactaaagagggcaaacatctttttctcaaattataaattgtcctgactgtgtagcaagcacaactgggatgccaatgcaagggtttcctgctctgtcatgtctaatatcaataatcagttgttctcagtctcacctttttttcattctccaaaaagagggtcaatcttatcacataccacctccatcaaacccttgccattttgttggctgaatacctgcacatcctgtatgcctatactcaaatggtaccatgctagacagtcaataggatgacaggcacccacatttcaagaaatgtgattaacttatggcaacaacagtcagagattattcttcccacaaaccactgaatgagtcagtcacacaaaatttctatttgtaccaagtatgtaatgtcacaaaaattgcaagcttcataatctatacttttttgtcaagaatggccctgtgcattaggtgcctcaaattctacaaaattaacacaagtcactgtgagagctcagtacacttctcaaagctactcagccaatgcatgacagataaagactcaaaatcaggtcttctggcttcaagtctcacaatcttttctattacttcattccaggaaattgaattctagttacgaaggcaaaactaacaggtaagaaacaatcaaaagcccacctatgcgatgggtttataagttcagtacaagggctggatcagcatgggctggaagatttaaaggaaaatgtttgggaatactttttttcacatgaactctacatggaagtgtaaaacaagtatatgagctgttttgattggagctagggtaggatcctcccagagcccctttcccactctatgcaatgaactctcctcagtaacttctcagccactagggctctaccgagtagtttggaagccaatggactaaatcagtagttctcaaagtatagtccctggactagcagtgtcagcaatacctggtaacttcttagagatgtgaattctttgaatcagaaattttggagatggggcttaataaactatattttagcatgttccccaggtgattctcagacttgtaaagtttgagaaatagtgaactacttcatctccataaagtaggaagggacgccacctgctttaaaagaacatttgagattgggattggaaactttgaagggggtagggaaggtctgggactgccaataggaagccttctctcaaatagcagagatagatgatagggatgaacgtcctgaccaaggctagaaggtgtcagtatgcacacccagtaatcctgtcttgcccctaaacttctcctgcaatacctagaataggacagaagacagtgggcatttgaggtcatctatacctggatagaaagtttaaggaaaagaggggtctaggaggccacgttgaagtgactggccaggaagggaccgaaatcttgatagaggaaatgaataggctcagtaatgtcagagaatgggagaagtggaatgaggaggcttaactaagcctatggggacggagaatctccatgtctgagatctcagtgctgacaaaatcctaaattacatcaaagtccaagatctggctctatttcatatttccctgtggaatttatgttactgaatagacaaacttgtataaaaacaatttctatatggtataaaaacccagacaaaagttgcagttttctacattcaaaaatatttttaatgtttttatttttatctgtttgtgagaatttgtaagattattttgttttgtttttcatatgagatggggtctcactgtgttgcccagtccagtcttgaactcctggcctcaagtgatcctcctgcctcagtctcccgagtagctggaattacaggtgcatgcccccacacttggataatttctgtactttttatgtgttggtgtaacattgtcttcgtcttttcttggaaagggctatatgtttattgttactgtctttaaaattgtggtaaaatatgcataacataaaaattaactattttaaccatttttaagtgtacagttcaggtatacttttttagtgccaaaaatgtcattcttctataaaataacaaatatactgtgatgggggagggggttgttcttactagaaaaattaagaagtcgttacttattttgagtccctaacttggtttcgaaatataacacgggactaagaaattcaggaatcaaacaactactgccctaaaggagagttgagatttacagggttaggatggtcaggggtggaaagtggtaagaacaagccagtagaaagaggaaggtgcagggcatttttaggagtgtgcagaccagacttgctaaaaacaaagtgcgcttgaaaaggaacagttagaattaagttttggtccattttaaaatatttaatacctaataatgtttggttcatagcagaaactcaataaatatttgtcaattgagtgtagtgaaagcttgagtgagattcagaagagccagaaaataaagtttaaatttcattttatagaccagaggttcccaagagatgtaccaagaatgggcagccaacgtgctaagctatcgatcacctttcaaaggagtcaggcagaagccagggcatctggtcaactctaggccaggtatgttctagtatgctgtacaagtacaactgtctatagatgtcattggtggaagacaataggaagcaatggggaaccactaaagataattgagcagtggagatataagatggcagcaatatttccaggaagactattgctgtggttttaatgttcatgtcccctacaaaattcatatattgaaatcctaacccccaatgtgatggtattaggaggtagagcctttagggagtaatttgatcatagggcagagccctcatgaatgggattagtgccctcataaaacaggccccagagaggtaatttgtcccttctaccaaacagtacacagtgagaaggcaccatctgtgagaaagtagcccttcaccaaacaccacatctgctggcaccttgatcttagacttgcctccagaagtctgagaaataaatttctgttgtttataaactacccagcttacagtattttgttatagcagcccaaacagactaagacatctattaacctcgtgataaagcaagagctggatcccaggctcaaagctggaatcactgggactcccaaggtatatattatagacatttgaaaattacttccccaaatttactctccctaaccccactttttaataataccgtaaaacgttccacaaaatggcctaggtgaaattgattatactctcacccccatgggtgagcgctgattggcttaaaacaactagcacctttttccccaggacccacagacattggttcagaaatgggcgcataatccagtcagggatttttttttttatgagaactcctaagaaaaagattcctgtacttctctctgaagttgagccagaaagcatgtacccctaagggctgttggcagccatctttggacaaaaaccagagagcctgaatgagaacagaggaggtgcagaggagaaatagtgaaagcaaaactagatccaggtgtcagcatttaaaatccttgatgtcttagccccggactctccagttactacttaaattcctgtttctgcttcagctagcttgggtcttgttttcttttacttgtaactgaggttaaagtgatcctcagaataagaggggaaaaagtggacccttgtggtaatctagcactctgggtagacagtagctgttcaaggaaaagagaagaggggtgcaggtggctacacagaagcgattagccatcaagggacgagggtggcattgggatgaaaaaggaagggctggctctgagcttcaccatgaaagaagtgcacatgagaatggtttctgtcgggccctcactttggttaattctactgctttctcctcagggatgatgaaggcccccagctcatccccagggaaatgatgcaaccaggtagctggatcagaaatgaaaaagtcaggaaaagggaaaggttgcttgcgcagttactagggatatgaaaaggaggctaaaaaacggcagggggtggcctggagggaatgtgaaacatttttgtgtgttttacacacaccgaaaaaaaaagaggacatggacagaaacctagagaataggaggacagcatagtatagttactaagaataagctaagagttggttccccgggaccaaacagataccatttccaaaacccacgaattacttaccggctgtctcaattcacctaagcttccctttcttgtctgtaaatgagcatgaaagtgccacctgtataaaataactcaggctcccaaaatgtaacatagggaagctcctagcagcgtgtctgggaggaataagcattatctgtatttatcgtatcaaattaagatagaggaacacaggaggacagtagaggatgaaaataaaacactacttagatcctgaccctcctcagtggcaagtagtgagcattcacttcgtacagaagtagcactaaggcaaattaaaagaaaggttcacatttcctctaaaagaaatggtttttgagtcatgccaataccacttactcaatgtcctctgtactatactattctctgacagagccacttattaaatgtgtgaactgtgctgacaacacttgacaactttcaacatgagggaacagcaggatcacttaacagaacaaaatcgtaaaataatgtcaaagcttgatttcaggtggtgcggtgtagcactgctcttcacgaaatcaggactcccccgaccaggcagggccgactaggttagagtgtcctgccctcactcacctggcagggcttgggatgagctggacgtgactgccacaggcatttctgttcaaccttgaagccttcgctacaggagaccgcctggcagtcgggctgggaagcaaatctgagaaacaaagagagaccaggcggaaagcccttgggaccaggaaggagagatgagattctggtttggcagtggcacctggtacccgctattaataaataataggactgtctgacatttataaggcactttatcggtaataacagtgtcatctccataagccattctattagtggtaacaaataatagccccacgcctgcaatatctcctttaatattcccaacgtccgctaagcgcgtctcatcaccatttaaagaaaccgtggctcctagaggtaaagtacttcggtcacaacgcgaggaggtccagacttgaccccagacctccagactcgagctgggaagtggccgaggctcctggtgagccgcagggcagcctgcccagccccgggaggaccgcgtgggagggccgggagagcaggtggctgccccccacaagggggcgggctcagccggccagtcctgcccggaacccccggcaacgcgcatacgactacacctgctccggagcccgcggcggtacctgcagcggaggagctctgtcttccccttcatctcacgcgagcccggcgtcccgccgcgtgcgccccggcgcagcccgccagtccgcccggagcccgcccagtcgccgcgctgcacgcccggggtgaaccctctgccctcgctgggacagagggccccgcagccgtcatgctttccgccatctacacagtcctggcgggactgctgttcctgccgctcctggtgaacctctgctgcccatacttcttccaggacataggctacttcttgaaggtggccgccgtgggccggagggtgcgcagctacgggmagcggcggccggcgcgcaccatcctgcgggcgttcctggagaaagcgcgccagacgccacacaagcyttttctgctcttccgcgacgagactctcacctacgcgcaggtggaccggcgcagcaatcaagtggcycgggcgctgcacgaccacctcggcctgcgccagggagactgcgtggcgctccttatgggtaacgagccggcctacgtgtggctgtggctggggctggtgaagctgggctgtgccatggcgtgcctcaattacaacatccgcgcgaagtccctgctgcactgcttccagtgctgcggggcgaaggtgctgctggtgtcgccaggtgagccccgaggatcgccctgccctggcaccagggcttctcggcgccttgactgacgagccacagcgtggcataaggggttcgcagagggaggttcagatcggaactgtaggtatagaaaaaggttggcagtgtttccttgaatcgcaaataatgatcttttaggaccacctgttgtggaagctgataatgtgctaggttctgtgttaagcactctacaggcagtgtggttkttaatcctcacaatgggtaggctttgttataggacttttatagatgagaccactgaggtcctgagaggtgaagcctcatgcccagcyatctatctccaaattccaagctcttaatcaatacttataacatctgcattaaaatgcagaggatcttgagtgcgaactctagtggatccagaggggctcttctcacctctgctgcttgactggctgtgtgatcatgggaaagtcacttctcctctctgtcccttggtttgctcctctctaatgaggcaggcttcaatgttgcttccagctctcaactgctgttagcatcctgtcccctccctgcagaacaaaggtgaccccacctgatccccagggagaagataytggggatctgctacaggaccgttgtgagcccccactgcatctatcacaatagtgaccctttcagttctgtggttagctcctgccacatttcagccagacttgaaacagtaacttaagtgatgacaaggtcaggaagtgacagagaacctgttactcacagggctgatggctttcccctcccagagagcttgtctctgcacttgaataaggaccaagggttccttctctcagtcagtaagaagaggcctacacaggagtgggctgaaagacctgggtgacagggtaggggtcgagggagccgaggagcctcagctttctagaatgcatttctgtgctaagccctatagtagatgcttttattaccccgggagataacatatcactatccccaccaccaccaccaccattatacagttgagaaaactgaggcttaaaattccaacctagctctatccaacttcgaagccatgctctttcctacatcttttttttttttttttttgacagtctcgttctgttgcccaggctggagtgcagtggcgctatttcagttcactgtaacctctgcctcccaggctcaagcgatcctcccagctcagcctctcaagtagctgggaccacaggcatgcaccaccatgcccagctaattttttgttatttttggtagaaacagggtttcaccatgttgcccaggctggtctcaaactcctgagatcaagcgatccacccaccttggcctcgcaaagtgctgggattacaggtgtgagccaccacacccagcctctttcctacatcttattgttttcctctgcatggatgtaaactgttaagtgtgctggaagggatgaagtgtccacttgctctaccccttcatttcatagctggggaaactgaggcaagctaagcgggttacagaaagatgaaaggttaattcacttgtgagaaaccaggaatcttacacacctgcttcatgtggcatgaaataaataatccaaaaaatataggctttgtataaaagtttaaaagcagaaagccaaattttaggctgggcgcagtggctcaagcctgtaatcccagcactttgggaggccgaggcaggtggatcacttgaggttaggagttcaagactagcctggccaacatagcaaaaaccccgtctcgactaaaaaaaaaaaaattagctgggcatggtggcgcgtgcctgtaatcccaactacctgggaggctgaggcaggagaatcacctgaacccaggaggcagaggtttcagtgagccgagatcatgccactgcactccagcctgggggacagagtgagactccatctcaaaaaacagaataaaaaaaagacaagtttaaaggtggctaaattatttggaagagatggtcctttcaagaaaattcccattaatttctagctgcctgagaaaagyrataacttcactactttgtaactagaagactctcctaagcctattactttaccagcttgcttggagggaaattattaacacagtgatctttgtaccrcttcaggaagcatttaaattctgtttatcactttagtatcccaggtcccctgagagggaggtcacagggtttggagttttgttgacaaagaagttcaggattaaatgaccataatacagtttgattctgcaataaagtcagaattacaaccagataccctcttcccacccagctaacagttgtctgccatagagctatgtgtttacatagagaatatatgggaatttctatattaaactcaaacgtgaaccagactttacagtggacctaaggcactctctggaccgtcaactgacctctgagggaggccacatatttgaaaaaaaatcagtttttccaaatcactgagatacctttgcacatgaagcaaaattacagtctgtcacagagttgcatgtttactaaacatgcccatgggaaaatatgttgaatggactgattcttagaattctttggtgttggaagggaccttagagatattctaaccctataatcctgtaagtttaatgaatgtgttatactttaaaaaaaaaagtttacagaagaaactttaataagcccaagaatcacctaggaagcttacttttttttttttttttttttttttttgagacggaatctcgctctttcgcccaggccaggctgctgtggcgtgatctcggctcactgcaagctccacctccctggttcacgccattctcctgcctcagcttcctgaatagctgggactacaggcacccgccaccacgcccggataattttttgtatttttagtaggggcagggtttcaccgtgttagccaggatggtcttgatctcctgacctcgtgatctgccggccttggcctcccaaagtgctgggattacaggcgtgagccaccacgcctggccggaagcttacttttaaaaacattctgaggctggacactatggctcactcctgtaatcctagcactttgggaagtggaggagggaggatcacttgagcccagaagttcgagactagcctgggcaacatgatgaaaccccatctctacaaaaaaaaaaaatacaaaaattaactgggcatgatggtgagcacctgtggtcccagttactggggaggctgaggtgaaaggattgcttgagcccgggaggttgaggctgcactgagctctgactgtgccactacactccggcctgggtgatagagtgagaccctgtctcaaaacaaaaaaataaaatttctgagatcatccccaaaaatgctgattcagtaagactatgttggggcccaggaatgtgtatttttataagaaaccccaccgccaaccctaggtgattttgaaacaaatggtctgaggactaggctttgagaaacagtctagtttcccattgtttttcattgttgtttgtttgtttgtttgtttttgagacagtctcgctctgttgcccaggctggaggtgccgtggcgcgatctcgactcacggcaacctccgcctcccaggttcaagccattctcctacctcagcccctcaagtagctgggactacagatgcccaccaccatgcccagctaatttttgttattatcagtagagatggggtttcaccatgttggccaggatgatctccatctcttgacctcgtgatccacctgcctcgtcctcccaaagtgctgggattagaggcgtgagccactgctactggccttctcattgtcttatagctgtataaacaaaggcctagagggatgatatgaattgcccatgatcaagtggatagttaggaacagaaaggtagagatagaacccaaatatttttttctcacttacgaggcactgtttattctatcacaccatcttgaacatgatacataaatgtcagtttgattccatattttgagtttcagcccagggcttgtggactagtaagagctcttgagctccatctgtcagtcaaattctgcagtatatgtaaaggaccagcacagaggcatttatcatgaggattgatccagttgttatgaatttgggggtttctttataacacttaacaggactcaaccctatcaggaatttcagtactcaattactcttttcaattttactatagttacagaaagtcaagactcataaacacttccctgaatcaagcagcagcactgtttcccagagaatatgactttctctctgttgtacatttcaggatcgttctccagggcagggtatgatctaggtaatcacatgggaaaattgtctccaaggataagaacctgtatcaatgttgtaactaataaaagccacatggctgggccagtagtttttcacccaactttccaaatacagaatatgggtaaaacagtaaaacatattttatttcacacaatatgggatattttataaaaacctacaaaagaggcctgaaattgtacatttgttccatttccatttatcctagcatcaagaccatcaataaactagctcttccactgggtagataacccaggtctcctgagggtcccttcatcagctcactggcagggtatacactgcctaactcaacacagccatgcgaggctcccacagtgtaggcactactcttatgcaaggctttagtaacagttaaagatactctctgttgcaaaactgagtcccaggtaagttataaaacgttccagattacctttgacctggttttgcaaggttgcagaaaacaaaatttgacctcctttaaacaatgtgataaaggaaaaatgcttacaatagctttcaaaaatattgcatcattaaaagctataagactgaagaacttcattacaaaacaagtgttgggaccaaggataacccttgtcatccaaacttttgagattagattgagaaaaactgatggtacaacaatttgattttcaaagcaagaaacatttagagggaggagaggccaccaaaaaaaaaaaaaaaaggagwgagagtcccaacaaggtacaagctagttttctctgtgccatgatgggatggagaaataagatgaattagttcaaggatcttacagtccagtaaaagaactaaaccgcatgcacaaatgattgtgacacccagtagaatgtgctcagtgtgctgggagggctacaagtgctgcaggaaaacaagcagaggtcaagagaaggctttttggggcactgactattgagctgaacaaatgcagtgggggagggggcattccaggcaaaaggagcaccagaggcagttctgatcaggtgcttaaaacagtgagatgcttcattaaaggatattgcgatgtaagaacaatggcagtctggacctaataatagtcatttttttaagctgtttcctgaagggacaggaaatggaaaaaatagggactcagagagtccaaagaatggccaacagcagtggcctcacttccacagaaggaaatatttaattttctaatgccaactttagtccagaatcaaggcacagaaataatctaatctacactcttcccaactctttggactgcccaaggagtaacttaaatgagttgtttcaatgcactttgtctcaaaggcttagaattctctcatatatctttgaataattccctagtaatgtctagcacatagtaggcaggcagtcaataagtgtctgttgggcagggcacggtggctcatgcctgtaatcccaacactttgggaggccaagatgggcagatcacctgagttcaggagttggagaccagcctggccaacatggcgaaaccctgtctctattaaaaatacaaaaattagtcgggcatggtggcgggcacccgtaatcccagctactccggaggctgaggcacaagaatcacttgaacctgggaggtggaggttgcagtgagccaagatcacactactgcattccagccggggtgacagagtgagactgtctagataggtagatagatagatagataaatagatagatagatagatagayagatagatagatagatagatagatagatgcatacaaacatacatacatacatacatacataatggatagataatgtctgttgaattaatgggttccattattctggttgattgtgacaggctttctctcctgaagcttaaggaccactgggttgggcatgagggcctgaaaaatgatgtaacaaaatcagatgtgaaaaaatccatttaaactcaatctaccccaggcccagccttaccctaccacaggcttacttacctctcaaaggtcctcctaatcaatgactctgtccagctctctggcagtacatggtaggacagcggtgctctccttgggtctcagtgcagcwagtaagcaggtggtgagcacaggatgggctggaaaggacctgtgagtagggtggtggaggaccctgtacaaggacagaaacccagacaccaaatgattaatatatccaagggctgggattcccagcctagtagcccaaggaaagatagcttaaagatattctctaaratttttcttctctccctgctcttaactaaagcttgcaaaggaggtgattgtacatctccatccaagaacaaaactagcactttgctggcatatatgggaatgcactttattttcttcagaaacagggactgaagaggtaaaaacaaactctgaatcaggtgttgttattgaatctgaaagagaaggatagagttcagattattctatataataggtgctagtatttgaaaaggaccttcccacagcctctgagaaaagggaagtagatcattggtagaaagatgacatggttgcttacagatatcaaatgctaacaattatgtaaggccttatgtgacctggtaactcatgataaggaattacctttgattccagggctatttagaaagcaagagttcatataagcaagaactttaacttggagaaataaaaattaacatcaaggagattactacttaattacctaaatgtaaaatgagtatgtatttccttgttaaatttttgcttactcctggtggaacttaaacatttttatgacctccgggtgatttgtgtggggaagaaggaggagcacatgcatgtctctctctctatatatagtattataatgtgcatcatcttgctgtacaaaatactgtcattccaaactgccaatgattgagatgcaaaattacagttacaaatggcattttaggaactatttttaggttgtcttcaaggactatgttattaatagcaccagtttgcatttcagttgcttttctgaatgaagaaaagagataaatcttcaagcttgacttgctcatcaaccaaccatttcatgatcagagtacatttcctttcactaccttccttttggaccttaccttcttggtaaatatttctggggtgttttgtttaatccagtcagttactcattcactgaggcagtctagtagcagaacaagctactagactgaatgttttcctattggaaagctgcaggtttagcctgagcacctgacaccttagtaatgaagattgattcagctcaccacctacccaatctctctgccttctagcaatggacttgtttattcagaaaattcttcctttttccttaaaaaaaaaaaaaaaggcaggggcagacttaatatgctaccttaattttttaaaattttctttgaacagactttaaaggggatgggggagtagtgttgtaatcacttgatttttcaacacccaagtgtgtgctctttctctgtgggtttatttcagtctacaacttaaaactagactgatgaagaaccgactgatggagctgctctacacccttcaggcaactttctgtgaccactgtttctcatactcaaacttttaataaagcttgaggttttgctcttcaagaaaagatcatccatgttactcattaaatgcagatccacatgattgaacaagcactgagcagaaggccaagcagccagcctcttccaagaaataaggcactttgctagaacttaatctgaatggctcatacaaggaggtgggaacctcagaagcccagaatgattcttttcattttgcatgtgaccctccatacactgacttggtgagcctcttctcatttgtagaaataagattactggtatctatatcacagagttgttatgaaaattatgtgaagtgatgtatgtaaaactataccaacagttctatgcaaatgaaaattttaaatgtttgttattagtaaagagagaggtgggtgcatgctctgatgtgccacccagatccctgctttaggactgacggactcactcttcagctgctgggagctctcagctgagacctctcccaggacttctccttggttgaagagagacactttgsccaaggttaagcaccaccaccccagcctgagtccattggactggtcaatgggcaggtgtgaaggcacagcctacctcccttaatttaggaggtaactctgaagggcatcccaggtccagagtccccttaggattagaggatctgctgagggagactyctgttgtgactgcattacagttcaatgtctccctctatccagtctgcttcccttgcagcctcacaggtcccattcccaagagcactcctgcatgcacatctcggagtctcagagaacccaaccttgacaaatagaattataggagcttacatgttctgattgatagatgagcagactttacaataaaaattataaaaggtagatagatattttatgcttgcattagaaaatatgtaggccaaccaggcagtggctcatgcctgtaatcccaacactttgggaggccaaggtgggcggatcacttgaggttgggagttcaagaccagcctggccaaattggtgaaaccccatctctactaaaaatacaaacattagccgggcatggtgacagccgcctgtaatcccagctactcgggaggctgaggcaggagagccgcttgaacccaggaggcagagattgcagtgagttgagatcrcgccattgcactccagcctggrtgacagagtgagactccatctcaaaaaaaaaaaaaagaaaaaagaaaatatgtaggcccaaacatatctacaaaagactcaagaaaataaaagacattaaatatcaactagatagttgacaggtagattcacatccagaatttcctttcaaatttcttttttctttctacatctttaagggaagaaaggcttccatagtgtgtccagatatggttggcaagccgctggaaactcaagtctgcccaaataacaaatctacaccaacagcctagaggagatggaaggagatggtgtagggcaggggcaatggccctcccttcagattagatgacttgcataaaaggtcaggaatcacaaactacatgcctgcagagggccagctgggaacatgaatgaagtacacatgaggtgaagttgcttggactgtgatcaagcatgacaccagcttaattacatttccttttattattaatttttcaagctaatacctgagtacatttttctttttttttaaattttttttttgagacagggtcccactctgttgcccaggctggagtgcagtggcataatcatggctcactgcagccttgacctcccaggctcaggtgatcctcccacctcagcctccagagtagctgggactacaggtgtgcgccaccacatccggctaatatttctttgtgtgtgtatttttttgtagaggtgttttgccatgttgcccaggctagctgtaagtacatttttcttaaaaaaaaaaaaaaaaagaagaagaagtacagaaaaacttaaagtcccttttgacctaccattttcccctcattaagatgattacttggaggtgaaaaataagaaaaaaaaaagactgttgctaagtcctatctactctacctaccagatatctcttaagtacattcacttctctctacccacactgctgcctacacagtgtagacaagcatcatctaacagctggtctccctacctcttctcccaaccttattcccctccaactctacattccagtcagctttaacctcttttagttactcaggccccaggctgcgttggctctgggcctttgcataagccgttccactgcccagactcaggcttagtcagtcccagctgatcttcatctccaccgtctgctcatctttcaggtctcagtttacagggcacttcttctaggtcgtctttctgcccccmaccacctgctccccaaataccttytccttcccctgttgtgacacctgtggcaatttattttgatttttgtttgtttgtttctcctctattagacctgggctctatgaaaacagggagagcgttttgctcactgtcatatccagcatgtagagacctgcctggcacacagggaacactctttaaatagatgttgaataaatgttgggagggagggaatgagaatggatccaggtaacttatgaacggattgtttgactatggaccctgagtctcatgacaggaggaaagaaaggagatttcacaattctttagcagtaggagttgttgttttaaaatttgcctctgtgggcccttacttgtaagcaaggcatacttgtatctcagaaattatttcatcttacattatrtttcattaaaggtttatcaactgccagatctgaatcctttaagcagctttascttattcctctgtgtcttccacactaatatcatattttgtgcaaaattttttcaattataaacatttattgagcacttatctagtagttctgggggtacaaagatgatttgattattrtcttaatttcaaagatctccctgtctaatagaggagaaaatgaattaaaccacatccrccaggcatggtggctcacacctgtaatcccagcaytttgaaaggctgaggtgggaggatcacttgagctcacaagtttcagatcagcctgggcaacgtagcgggacatcatctctacaaaaagttagctgggcatggtactcctgtagtcccagttacttgagaggctgaaatgggaaaatcacttgagcccaggaggttgacgctgcagtaagccatgatcacgccactgcactycagcmtgggagacagagcaggaccctgtctctaaagaaaaattaaaaaattgaaccctatcatactgtgtataagygccctgataattrtaaatacgggctcctatgggagctgtagaagggagcagctaactttgcagagggagggaagataacagaaaagaagtgctacctacactgagtcttgaaggataagcaggagtkttccaggtgaccagggggtgagaraccatgaaacaacctgggcaaaagtaatgagacgtgagcatacaggtaccttcagggattttccatagatcaatgtggttagaggaaagagggcaagaggtagagagtaggagatgacacagaaagcaagcaggagtgggaccgggaggcacctccggtcctcccgaataaggagagtggattctatcacaaggaatgaacagccctgaaggatcttaaacagggtggcaacaagaaattggatgagagtgaagctgataaattagaagcaggaagagactcaagggcaggacattggtcaggaggctatagcaataatctaggtaggaaataatgaggacatgagccaaggcagtggcacaggagtggatgctaccactcccgtttctacaacagtcatatttatggtaacctttctggagtgctgaaggattagagagcaaccagacaaaattttttaaaaaatgtaaaggaggggaataaagattcttggggcaaaagaaaaaaaaagaactgttcaagaaagtaagtacaattatagtactttacttggctccgtggtgaatattttcatagtcacatttatgttgattctgattattggttttcagcttctagagcaaatccataaagctgggaagacagaataatggtatcagaataaatataaatgctattaccctagacaatgtaaagggaagataataactgtcagaaatgaacagggtgaaatggaagtagggatcaaaattgataggccaagaactagcaggaaatgcatattttttggtgatggaaaggtaattgccagaagaaacagcttttaaaaaattgacagtggtgggccaggtgctgtagctgatgcctgtaatcccagcactttgggaggcagaggcgggcggatcacgaggtcaggagatcgagaccatcctggctaacacagtgaaaccccgtctctactaaaaatatgaaaaaaaaaaaaaaaacaaaaacaaacaaattagccaggtgtggtggcaggtgcctgtagtcccagctactcgggaggctgaggcaggagaatgctgtgaacccgggaggcggagcttgcagtgagccgagatcgcgccactgcactccagcctgggtgacaaagtgagactctgtctcaaaataaataaataaaataaataaaaaattgacaatgatttcccctaggcattagctttagttgtgaggaaggcctgggtgaggacttgtttattttcattgtaaacacttttgtactatttgatttattgttaccaggtgcatgagtcttttgattaaaatatttttttaaattttaaatgcatctatcccggtgatatttcttgtctttatggagatatcatacacaaacatctgaaaaacaaagcatatcagatgaattaggtgtagcctccccaaggtaataccctgggacatttagtcmccttcctacccagcactttgggaggccgaggcgggcggatcccgaggtcgggagattgagaccatcctggctaacactgtgaaaccccgtctctactaaaaatacaaaaaattaactgggcatggtggcgggcgcctgtggtcccagctaccgggaggctgaggcaggagaatggcatgaacccgggaggcggaggttgcagtgagccaagatcgcgccactgcaccccagcctgggcgacagagccagactctgtctcaaaaaaaaaaaaaaaaaaaaaaaaatatatatatawawatatatatatatatatatatatatatatatatatgtatgtacattcacttccgttatcacaattcaagacaagtaggcttaaaagcagtctcactttacggcttaaaggcacaaaatccaagtagcaagcatgaaatgtggtttgcatattaaatcggtgcctttaacatttttgaccttaacccagtaagaaatacttttgtgcgtgacccagtacccacacacccacataactgaaacaaaacttttaaaaatgaacagccctgttcatctattaggaataattcctaaaacagtgttataggaatactgctatctggaagaagcaatattaagagtagtgtgtactaggcatttttcaaggagctctataacatttattgataagattctgctaccactcttgagatgagtactayttttattccattttagagattcagaaaatgatgcttagagaggttaagaacttctcaagataagcggtagaactgtcagtagaactgttaccttttactatgytaagatgtgcttcaaaatttctatttccttaagtatttttcattttttwaaatatcgctcagtttaaatgattttaacaatccactactgtaattatgacccacaggttgggaaacactgctctaaattaatcactccttttttttccctcagattagaaaacaggcttttgaaatttagagcttatttctcagatcagtttaaccttcctaggaaattacttgttactgatgcataagaaaaaattgttacataaagttagcttctatcatctttgttaattagcatggctcccttcttttcatttctcttctccttccttaaaattttctctttttttcatctttagtcctgtgtggcacatattaggaatagccaaatttatttctggagtatatttagatatacatcagttacacacggatatttcttgggttttgcccatatgtctattggtttgcacttgccacaagaagtacagatttcagccaaccatctgctatgcttgtgaaaccatcaaaacccaaccttccctcaaatattggaatcctgtgatttttttttcaaatgtagtaaatttcatgtttaaaatgcataatagggctgggtgcagtggctcatgcctgtaatccccacactttgggaggccaaaatgggagaattgcttgaggccaggagttcaagaccagcctggtcaacatagaccccatctccattaaaataataataataatataaaatgcataacgataagcatcatttgtcatgcccacayatttaagcaaaaaattatgctgaaaataaaattatgatgcttgttgaagcactaatagaactttaatagactgatttagtttgttttgatwtttttcttattaaattaagaactacaagcagctgtcgaagagatactgccaagccttaaaaaagatgatgtgtccatctattatgtgagcagaacttctaacacagatgggattgactctttcctggacaaagtggatgaagtatcaactgaacctatcccagagtcatggaggtctgaagtcactttttccactcctgccttatacatttatacttctggaaccacaggtaaaaataaaggggggattctccaaaaaaattaatctgaaggagttaaatgttgacacaggttttcaaatctctttctttggcaaaacgtattgggtaactaatacttcaggagatttagttatttgcctgcggraactgatcttatttcrtagcatgtgatcccatttgsgtttctccaagctatgcatattttccgccagttggtatagaacagataaagaggttaaccaagaactacagaagtagttatgatgatgaatgagatttggcactgaatgggtagttggaattttttttcatgcttgttgtattttgattatattacatccagagtccatatagactgtataattgattataaatggaacacaggagaagaccagtgaacaatgaggaggttctatttatataaatgttttaaccgttatcttcccatgcaacactgatttggagctgtttggtgctgtggatgtggggtggctgtagcataagacctaaaatactgtatttcatcaaatctaggatgccttcaactgtaagctgccccattatgagccactaagaagaaacactgycaattaacaatgttatgggaacactgctgtatggaagaagcaatattaagggtagcatgtgtactaggcattcttcaaggagctttacaacatttgttgataagattctgcccccactcttgacatcggtactctttttacttccattttagagattcagaaaatgatgcttagagaggttaagaacttcccaaggtaagcattagaactgtcaggattcaccttgcaggctgattccacagctcatacaattgacagctctaccccagtaccttcttgtttattcgtgtgatagatatttagtgtctgcctactacaggccaggaagaccaaaatgtaataatatgaagcctgagggatatatttaaaagaaggacaggaagmcagccccagcatgccaattattattattaatattggaaaattgaatctatgagtcttttacctctgttgattaaaattttaatttaatttaagcaggtaatacaggtcttctccttgttaaataatcaatagaccaggataaaatttccttgagccttttatctcagctgcagctgacaggaactgtctccttcacctcgacaggccctcagcacccacctgagctcacagttcctggacctgagtttaacctgattgttgacttcacttcatacagtcacttttgctaagtatttaagtaaatgagaggaagccaggaatgacatattaaagctggtgcccaaaacataatgtctatcttttttttttttatttttattgccaggccaacagaaaggtgagatggcacaattaaccaattgcttctgctgcatgcagacactcccttaacatatgggacttttatcatcatttcttaatagaatggtaaaattaaattgtaaatgtttataactttgttacaatgcatgttttcacagtcaaatagaaaaccccttttattgggaggccgaggcaggcagatcacgaggtcaggagatcaagaccatgctggctaacatggtgaaaccccatctctactaaaagtacaaaaaattagccaggtgtggtagcgggcacctgtagtcccagctactcaggaggctgaggcaggagaatggcatgcatgaaccagggaggcggagcttgcagtgagccgagattgcgccactgcactccagcctgggcgacagagcgagactctgtcttaaaaaaaaaaaaaaagaaagaaaaaaaaagaaaaccccttttagggagaaaaaagagaatgagcatcctctgatttaatctcgtaagtcagaatttatatttaattggaagacaattagaagggtgtttattttacttttttcattttctctgaatcaaatatttgctaggccaagcacagtggctcacatctacaatctcagaacttkgggaggccaaggcaggaggattacttgagcccaggagtttgagaccaggctgggcaacatagcgagaccacatctttacaaaaacattaaaaaattagctggcatagtggtacaccttgtagtcctagctacttgggagactgaggtgggaggatcacttgagcccaggagtctgaggctacagtgacgtgccactacaccccatgctgggtgacagagcaaggcactgtctgtagaaaaaaaatagtgctaagttactcttgtaaacattaattaaaagaatttgtttaaacagttggagaataaatgttcctgctcctcaaaggaagtcattagcacaaaattatataatagttaccagatattctcatttattcattaatacaaaatcttaatttaggaaagttctgaaagtacttcaaggcaacaaagatgagcatttctttttaaaaatttcagaggccaggcatgatggctcatatctataatctcaacactttggggccaagatgggaggctcacttgaagccaagagttcaacatcagtctgggcaataaagcaagaccttgtctctacaaaaaatataaataaacagccaggcatggtggtgcacacctgtggtcccagatacctggggggctgagacaggaggatcacttgacctgaggctgtggtgagccttgaacaccactacactccagcctggcaacagagtgaaagcctatctcaaaaataataataataataataatacataaaacaaaacaaaaaactgggccattgtcaaagaaaatgaattttgaattgtgtttacaataatggtaggttgctagccatatttgtctgccttgtaacaagttgctgctatttgggcactatctggtgaaggtaccaccaagtattgaagaatctgagtcaacagagatctgtcttcctcttcacgaagtctgtttacccactcagatcttaaactcttagtccccttcccagtgacttcatgccctccccaattgaactgttcttccatgggaaacaacataagcatacacttacagaagaaaatcttacaaaaaacgtatataaattatggttaagaaagtgcaagcgcatttagtctaatgtactaaaactacactgagatacggtttttcacctttcagactggcaaaggccccaacatttaagagcacacattgacaaggctaggaggaaacaggcacactcatgtattgctgataggagaatgaatggggacagcccttataactggcaatgtggaagttatctatcaaaattacaaagactcttactctttttttgagacagaaactcattctgttgcccaggctggagtacagtggcaggatcagggctcactgtagcctcaacctcctgggctcaggcgatcatcccacccaagtagctaggactacaggtgcataccrccacacccagctaatttgttttactttttgtagaggaggggtctcactatgttgcccagactggtgctgaactcctgggctcaagcgatcctcctgcctcagcctcccaaattgctgggattacaggactggccaacttttatcttttgacacaacaatctcacttcagtgaatttatccaaaagatatggtgtcattcatagtgtgaattgccaygtggacgagcttcttcactgcagcatcatttataacagcaaatagtataaataaattataatacacttataaaaggacttgaaggagctgagaaagagaataaataaatgaataaataagggaaatctttatgtacaaacatgaacaaatctccagtaaacattgttaagcagcagagacaaaaaacatgcaaaagagtgtgcatatttcttttttttttttgagatggagtcttgctctgtcacccaggctggagtgcagtggcgctatctcggctcactgcaacctttgcctcccaggttcatgccattctcctacctcagcctcctgagtmgctaggactataggcacccaccaccacgcccggctaattttttgtatttttagtagagacggggtttcaccatgttagccaggatggtcttgatctcctgaccttgtgatccgcccgcctcagcctcccaaagtgttaggattacaggcgtgagccaccgcgcctggccaagtgtgcatattttttaatggaaaaggcaagaacatataagcaaatgttcatatttgctttgtttgtataaaataactctagtacgtaagaaatctctctgactctcagccttcacatctgtggattggagaatataattctgtttatgtcatatataaacttgttatggatttttaaaatgtcttgcaaagtggtagccacagggcagaaattcaatggacagtcattcctctgtttctgtttctcttcagattactactgtcataaccatctaactcaggagttagcaatctatggcttgtgggccaaatacagcctcccacctgtttttgtaaataaagttttattggaacacagccacactccatttatgtatgtgtatggctgcttttgactacaatagcagagttcagttgttgcaacagagattgtatgacccacaatcccaaaacatttactmcctggtcctttatagaaaacatttgtcaactcctggactaactggtcatggcccttcccagtgcaattctcaaaatacagggtgatgaatcttcctaagccagatctctctcctacactgtaaatgcccaatcttggttaactcatgccttctcttgtatatttacaaaggtcttccaaaagcagccatgatcactcatcagcgcatatggtatggaactggcctcacttttgtaagcggattgaaggcagatgatgtcatctatatcactctgcccttttaccacagtgctgcactactgattggcattcacggatgtattgtggctggtaagctttttctacaaaatgttggaggcgagtgcacatttacattttcccagaaggaacagtaatacaaaatttggctacgttgctgtctgctaggaacagttttcaattttgcattaacaataaggcaatttgaatcacatattacaagcaagcatctaaaataatctgtttttcatgcctgcctatctaataatgtaatgctataattgttcagtatatcaagagacaaactcctttaaaatattttagggctgggtgcaatggctcacacctgtattcccagcactttgggaggccaaggcaggaggattgcttgaggccaggagttcaagaccagcctgggcaacatagcaaacctcatctctaaaaaaaaaaaawawatatatatatatatatagccaggcatggtggctcaagtctgtagtcccagctacccaggaggctgaagtagaagaattgcttgagtccaagagttcaagattgcagtgagctgtgattgcaccactgcactccagcctgggtgacagagtgagaccttgactgtaaaaaaaaaaattttaggttatgacacttgagtcttagattctatgtcatgtcatttccatctttagaaacttgcatgttaatctccatcagctttaaacttctgcagttgtgtgcactcttctgtaatctcccatttccacagcttttcagctctactagaaggagagaagatggcaactccatcagaatacttggcttggcttggcttgccatctcttctgtttccttctcagactttactattcaaattggagttgccatcctctctccttccaggaggattcatgtcacttgtatacattaccgcaaagttcaatagccaactcttccaggaagctatatgtaactttctgactgagctaaataaacaactttttctctcatgtggcatttcattttaaataatcatatatgtatatataaaaatatatacacatatgtatatacacacacatatatgcgtgtgtgtatatgcatgcatgttatggatggatatttgtgtcccccaaaaatgtatatgttgaaatcctaacccccaatatgatggtattagcaggtagggcctttgggaagtaattgggtcatgagagtagtgccttcatgaaaggtagtgcccttatcagaacaggagacagccagcttctttcctgactctgttctgttccatgtaaggacacagggagatgatgaccatccccaaaccaggaaaaatgccctcaccagacaccagacaccttgatcgggacttcccagcctccagaactgcaagagataaatgttgtttaagccacccatctgtactattttgttatagcagctcaaacacacacacatacacacacacacacacaatcyaaaaatttgaaatccaaaatgctccaaaatctgtaactttttaagcaccaggacaccacaagtggaaaatactacacataagtacttaacacaaactttgttttatgcacaaagttatttaaaatattgcatgaatgggccaggcacagtggcttatgcctgtaatcccagcactttgggaggttgaggtgggcgaatcacttgaggtcaggagtttgagactagcctggtcaacgtggcaaaaccccatcccttcttaaaaaatacaaaaattarccaggcatgatggtgtccacctgtaatcccagctacttagaggctgaggcaygagaacccacaaggcagaggttgcagtgagccaagatttcaccactgaactccagcctgggcaatagagtgagacccgggccaggtacggtggctcacgcctgtaatctcagcactttgggaggccaaggggkacagatcacgaggtcaggagattgagaccatcctggctaacacagtgaaaccccttctctactaaaaatacaaaaaatttgccaggtgtkgtggcacgcgcctgtaatcccagctactcaggaggctgaggcaggagaatcacttgaacctggggggcgggtgttgcagtgagtcgagatggcaccactgcactccagcctgggtgacagagcgagactctgtctcaaaaaaagaaaaaaaaatagagcaagactctgtctcaaatatatatatataaaatacatatatatgtatgtgtgtgtgtatatatataatatatatgtatgtgtgtgtatatatatgtatgtgtgtatatatatatacttgagacagagtctcactctatttatacatatatttagtatatatataatataatatatatatatattgcatgaaatctctttccctctcccctccctccctcttaggacttcatttgaatctcttactgcaagctaacttttattaaaatgacctttgtatgagtcttctcctccatagattggaagcccctatcgaacaaaaccatgtcttactaattttttgcrtttgaatataaggtactcaatacttgtttgcaaatataatttatttttaaatttctaccnttcaaagttgacaaattaaacataactgggagaattttttccaccatttctttcttgacactttctgtgctttctctgtaggtgctactcttgccttgcggactaaattttcagccagccagttttgggatgactgcagaaaatacaacgtcactgtcattcagtatatcggtgaactgcttcggtatttatgcaactcaccacaggtaacactccccccgttttactatcattttgaaatgggtaagatggaaattcaagtcactttgggttgtgctaggcttcaactgatttgcatatatcagttttgagtttaggatacaattatcatgataaagtacttggcactatacctaccatatagaggggacttagtaggtgggagttaatattattattatgatgatgattatttcctgcctttttacttgttttcacatcttactccccacctagcatatcctgcatttccccctctgcttactaaaagccaktgtcaaagcccagttcaaatgatacctcatacattaaacmtatttgggtcactccaacaaaagtcattactcttctcccctacgtcattttatttctaccctctgtggcccttgtcatgttgcaggagtttgtgttcatgtctcccatccttccttggctgtaatatctttgatggctggaaccacatcttgtctccttgttttctgttataccgaaggcatacaggaaacttttacttaatgctgtttaacaaataaatctctgtgtgactttgaaaccagccagccaagtctgtcaccaagctgggaacagatgccccagggcatctccaatggccttggatctgccctgtttgcagatgttcagctctcgatggggttgttctcaagagctcctcctgcccagtccctcaactctcatcagagatctggtatcagataggatttatcaatggtggcactgctgacattttgggcttttaattctttgccgcgcggacttattctgtgcattgtagagtgtttagcaccctttggactttgcccacgagatgccagtagtaacctccccacctccccaggtcatgatcatcaaaatgtctccagaaactgccaaatgtctcttggcagggaaatgctaacctagttgagaaccactgtactagacaatgcagtaaactcaccagattctaatccctttcaccagattctagttcctttattcagtcagtttaaactcaaaggatcactaagttgataaattgctattgataagcacctgttgtactcacctaacataccagctgccgtgtgacgcagaaagaagtgtcagatgctcttcccccaggtctctctcacctcactttactcagtctctgcccagatgttgcctcattagaagacaggcctcttctgctaataatcaaacatatcatctgcccctcactccagcttgtcactgcatttcatggcacctgtcactcctgacatagtaaaggtttatgtgattattgtctgccccccctcgccccaattaaatgaaagccgcatatgagcaggggctctgtccactaccagatctacggcaccaagatctgtaaatgacacatcataggcatcaacagattttgtggactgaacctctaaatccttgcccctgaaaaatgtgtagttgagttgagggagctaaaatgtttccccaraatgtttgggcttagcacatattattctgattttttggcatattcaatagattctcgaggatcatcattagcagtgagttgggttagggtattttccacagcagttctgttcatgtcattattgaatttttttcacattaatattccacgtggcctccaagatagcatgtctctctattaaaatccagaaatccatatgggrcccttctgctgggcttttcttctctaccttaaaggcactcctttgtcagttagaaaatctcctggggagtgtgtgttgtttctgtatgttctaatgggagcttcctttggactggacgaaaataaatatgtttgtgtgtagctgtcttcaggcccacacatatccacatatacacatgcacacatacacacatgcatgcactctcccagtttttctcttactgttgtctcaaatactggaaaacaaagacaatttcactggggttttacaacttcaaaatatactatgatttaatgcataatcttgaatgacccctggacttcctatttgccagtgcttccccacccctgagttctgtttggaaaatatttataaaaagtataataaaagatcaaagttatctcaaaaaaaaaccttcagttaaagatttttttaaattataggtcatcagtccaggcacggtggctcatgcctctaatcccaacactttgggaggtagaggtgggcagatcattcaaggtcaggagttcaagaccagcctggccaacatggagaaacccagtctctactaaaaatacaaaaattagcggggcttgttggcacgtgcctgtaatcccaactactcaggaggctgaagcaggagagtcgcttgaaagcaggaggcagatgttgctgtgagccaagattgcaccactgcactcaagcctgggcgacagaacaagaccctgtctcaaaaaaaaaaaaaaaaggaaagaaagaaagaaaacaatcatatgtcattagacaagcaggagatctatgcaaatttttttaaatttaatcataggtcatcataggaagtagaaagtacagattgtatgggatgtagggaaagattatatcaaaaagactttgcaaaaaaaaaaaaagaattggataaaaactagaatgaatgggggaagggcctggatcaatgtaatcaggaacttcttcacccttagagctgcctagaatacgctgttgctggagggactaaccccaccagcgacccccaagcactggatgccagggaggcaacctctgccttagcagaacagctaaaccaagtgacacccatccacagacatatatggcccagctcatcaggagaatctggggccagtgttgggaggtagaagccactgtgcttctctgccctcttcttaaccatattcagtagcttctctagtagagcagtgggctatggagaatgcttccagccctgctcaggtcagtggttcagatttggccccaggtacttaaagtaatgctgagagcaagtactctggagttagtcggcctgcattctgactctggcattggagcaggatagttaacctctctaaatctcagcttcccgtcagccaacaaggagataatagtacctacctcacatggggtctatgaagacaacctgagatgatatatataaaccacatagtagctggaacttagtaaattctcaacacatgttgccattattatcattatcactttccatgcctaacagtgtgtagctcataataagtaccccatacatatttgttgaatgaatcaatgaaaattctgcccacttacacaaaggaagaaataagggaaaacattctacttagttaatcactctcatctgaggttgagtaggggatgggatagcaaagctactgacttaagtgatttttaaaatattatagtgaatattttctattttgccrtcttcccgcattgtatttgggcctttgctttcaaagcgactgtttgtaatgaaaggccattctgattcatttcttgcagtgtatggttgtcagctcccattcggtttttgtagttgcctaaaaacaatgtcatctagggaaagttatttattggagcatgatattgctaaagctcagtgtttctttcctccagttacagactgaagctacagtctgtactggacaaggctccagtacaggggtctcaatgaggctttatgacacctgctggagtgtgggaggaggaagacagaaagggaaccaaaaaagagttccaggggccacacatagaaccatgatatttggaaggagaaataatattggccagaaccctgaaaaagctgaatagattcaacttacctctagtgttgactgcgtccccccagaattagataacctctgtggtcccttctagcctaaaatttctgtctctgcatcagcttcattctgttcaaaaaagagaatggatggatctgttgcagcacagagtggagagtggccaatatgactggggcccaagacagagggaggccaaaagaaagagggaaggggagcagaatcaggaaggttcgccagggaaggtgggctttgaagagtacggagaagttctgcagccaggcaagaaaagaagggcttctggctagcaggaaaatcacgtgagcagtgagatgaaggacccagcacactgggaactgcaagcagtctggcaggaggtgaagctgaggggctgggtcaggtggcaagggctttactctgctgagactcaaatgtgaacatgacaagccatgactaaagggccttacatggaagagcaatgtgggagatggcatttttagacagtccttttggctacgatgtgagaatacacagaaggatgaagrgcctcttctgtaaagcaaacaggtggagccttgtccaggcagaagtgtaacatattaattattaagaacagggactctggagtttttctaaggtgataaagaccttcttccctttcacctcttggaagtcaccccaaaacaaggcgatgagaaaaacacacacaagcaccatcatctcagaaactaagagacattgcaaccatgaactacatagtataggaagctaaaagataacagtgactgacatagtaggctgagaagggtgaaacttaagaggcaagtcccaacaggaaggaagccagttgccttcctgaaggctgagaaattgcaggctttgaatacagctgaaggtgggatgaagtgtcagacttaaaacaggggagttatttgaaaatctgtgtaagaagtaaaatacggaggacaggatcatggcgagcgggaggcaggactagattgtggctccagacagagcagcatgagaggctcacattgtgaattttagctccagcttgactgcaagaactaaccagcaaccccaagaggacccacagaccctctgaaagaagtggattgctcctagaggacccgggagacaccccaaatactgtgatcgccccaactgcagaagtgggaaagggagaccctcatctcccgaacacatactggagaagctgaaggtctgtttgtagaacttcccgactttacctggagcctcgtcaagttagagagccaaaccgagcaaaatacaaaggtagaggaagctgcagaaaggccctgggagctcactggctcccctagcagcccattcccgcctggcaccacagggatccatcaggagggtggccagaggagcagggggcaaaactccacagggagaaggaattctctagctaaactttgggataatttgaacggggcaagaagactcctggccagaactccagggagggtgtgaatctggcttgcagactccacaggcggagaagaactaaagccctttctttaacagctgggaggcagaaagccttgggcaagttttcaagcctgactcgccctccacctggaaacagactcggggccgttgagggggcacggtgggagtgagaccagcccttcaggttgcctggaagctgggtgaggcctgtgactgccaactttcccccacttccctgacaacctgcatgactcagcagagacagccataatcctcttaggtacacaactccagtgacctgggaatctcgcccccatcccccacagcagccacagcaagacctgaccaaggagagtctgagctcagacaggcctagccctggccccacctgatggtccttccctatccaccttggtatcagaggacaaagaacatataatcttaggaattctagggccctgcccactgctggtgcctgtccacactattacagctgatgctttctggaaagtaccacctcctggcaggaggccaacagyacaaaacagggaattaaaccaccaaagttaaggatcccatggagtcattgcatcctctgccacttccactggaacaggtgctggtatccatggctgagagacccataaatcattcacatcacaggactctgttcagacaacccccagtaccagcccagagccaggtagacttgctgggtggctagacccagaagagagacaacaatcactgcagttcggctcacaggagccacatccataggaaaagggggagagtattacatcaaaggaacaccccatgggacaaaattctgaacaacacccttcagccctagaccttccatctgacagagcctacccaaatgagaaggaatcagaaaaccaaccctgctaatatgaaaagccaaggctcatcaacatccccaaaagatcacactagttcaccagcaacgaatccaaaccaagaagaaatccctgatttgcctgaaaaataattcaggaggttagttattaagctaatcagggaggaaccagagaaatatgaagcccaatgcaaggaaatccaaaaaaacgttacaagagtgaaaggagaaatattcaagcaaatagatagcttaaagaaaaaaacagggccaggcatggtggctgaagcctgtaatcccagcactttgggaggctgaggcaggcagatcacaaggtcgggagattgagaccatcctggctaacacagtgaaaccccttctctactaaaaatacaaaaaaattagctggagtggtggcaggcacctgtagtcccagctactcgggaggctgaggcaggagaatggcatgaacctgggaggcagagcttgcagtgagccaagatcgcgccactgcactccagcctgggagacagagtgagactctgtctcaaaaaaaaaaaaaaaaaaaagtaaatgaaaaaaacaagcaaaaattcaggaaactttggacacacttttagaaatgctaaatgctctggaaagtctcagcaatagaattgaacaagtagaagaaagaaattcagagctcgaagtcaaggtctttgaattaacccaataaataaagacaaagaaaaaataataaggaaatatgaacaaagcctccaagaagtctaggattaaaagaccaaacctaagaatacttgatgttcctgaggaagaagacaattctaaacacttgaaaaacatatttgggtgaataattgaggaaaacttccaagccttgctagacctagacatgcaaatacatgaagcacaaagaacacctgggawattcatcacataaagatctttgcctaggcacattgtcatcaggttatccaaagttaagaccaaggaaagaatcttaagagctgtgagacagaaacacctggtgacctacaaaggaaaacctattagattaacagatttctcagcagaaaccctacaagctagaagggattggggccctatcttcaaccacctcaaacaaaacaagtgtaagccaagaattttgtatccagcaaaactaagcatcatatatgaagaaaagatacagtcgttttcagacaaacaaatgctgagagaattcgccattaccacgttaccactacaagacctgctaaaagaagctctaaatcttgaaacaaatcctgcaaacacatcataacacaacctctttacagtataaatcacacaagacctataaaacaagaatacaagtgaaaaagcaaacaacaaaaaaacaaaagttcacaggcaacaaagagcatgatgaaagcaacagtacctcacatttcaatactaacattgaatgtaaatggcctaaatgctccacttaaaagatacagaactgcagaatggataagaactcaccaaccaactgctgccttcaggagactcacctagcacataaggactcacataaacttaaagtaaacaggtagaaaaaggcatttcatgtgaaaggacatgaaaagtgagcagaggtagctattcctatatcagacaaaacaaactttaaagcaacagtggttaaaagagacaaacagagacagtatagaattgtaaaaggccttgtccagcaggaaaatatcacaatcctaaatatatatgcacctaacactggagctcccaaatttataaagcaattgctactagacctaagaaataagatagacagcaacacaataacagtgggggacttcaatactccactgacagcactagacaggtcatcaagacagaaagtcaacaaagaaacaatggatttaaactatactttggaacaaatggacttaacagatatatacagaacatttcatccaacagcagcagaatacacattctattcaacagcgcataactttctaactttcaccaagatagaccacatggtggcccataaaatgaacttcaataaatttaagaaaattgaaattatatccagcactgtctcagaccacagtggaataaaactggaaattaactccaaaggaaccttcaaaaccatgcaaatacagggaaattaaataacctgctcctgaatgagcattgggtcaaaaacaaaatcaagacagaaatgaaaaaattcttcaaactgaacgacaataatgacacaacccatcaaaacctctgggatamaacaaaggcggtgctaagaggaatcttcatagccctaaaygcctgtaacaaaaacactgaaagagcacaaacagacaatctaaggtcacacctcaagaaactagagaaacaagaacaaaccaaacccaaacccagcagaagaagggaaataaccaagatcagagcagaactaaatgaaattgaaacaaacaaacaaacaaaaaaaaagataaatgaaacaaaaagctggttctttgaaaagataaaattgatagaccattagtaagattaaccaagaaaagaagagaaaaaatccaaataacctcactaagaaacaaaacaggagatattacaactaacaccactgaaatacaaaagatcattcaaggctactatgaacacccttacgcacataaactagaaaacctagaagagctagatacattcctggaaaaaatacaaccctcctggcttaaatcagattaaatcagaattagataccctggaacagaccaataacaagcaggaagattgaaatggtaatttaaaaattaccgacaaaaaaaagtccaggaccagatggattcacagcagtattctaccagatgttcaaagaagaattggtaccaattcttttgacactattccacaagatagagaaagaaggaaccctccctaattcattccatagagccagaatcaccctaatrccaaaaccagaaaggacataaccaaaaaagaaaactgcagaccaatatccttcatgaacacagatgctaaaatccttaacaaaatactagctagccaaatccaacaacatatcaaaaagataatccaccatgatcaagtgggtttcatgccagggatgcagggatggtttcacatatgcaagtcaataaatgtgatacaacacataaacaaaatgtaaaaaatcacatgataatctcaataggtgcagaaaaagcattcaacaaaatccagcatctctttatgattaaaactctcagcaaaatcggcatacaagggacataccttaaagtaataaaacccatctataataaacccactgccaacataatactgaatggggaaaagttgaaagcattccccctgagaactggaacaagacaaggatgcccattctcaccactcctctttaacatagtactggaagtcctagcyagaccaatcagacaagagaaagaaatacagggcatccaaatcagtaaagaggaagtcaaactgtcactgcttgctgacgatatgatcatttaccttgaaaactcttaaggactcctctagaaagttcctaggactgataaaagaattcagcatagtttccagatacaagattaatgtacacaaatcagtagctcttctatacaccaacagcgaccaagcaaagactcaaatcaagaactcaaccccttttacaatagctgcaaaaaaaataaaatacctaagaatatatctaaccaaggagtcaaaaggcctctacataaaactacaaaatgctgctgaaagtaatcataaactaaacaaacaaatggaaacatatcccatgctcatggctgggtagaatcaatattgtgaaaatgaccatactgccaaaagcaatctacaaattcaatgcaatcccatcaaaataccaccatcatccttcacagaattagaaaagaaaattctaaaattcatatggaaccaaaaaaagagcccgcatagccaaagcaagactaagcaaaaagaacaaatctggaggcattacattaccccacttcaaactatactataaggccatagtcaccaaaacagcatggtactggtataaaaacaggcatgtagaccattgccacagaatagagaacccagaaataaagctaaatacttacagtcaactgatctttgacaaagtaaacaaaatcataaagggggcaaagtacaccctattcaacaaatggtgctcagataattgccaagccatgtgtagaataaaactggattctcatctctcaccttatacaaaactcaactcaagatggattaagaacttaaacctgacacgcgaaactataaaaattctagaacataacattggaaaaacccttctagacattgacttaggcaaggatttcatgaccaagaacccgaaagcaaatgcaataaaaacaaagataaatagctaggacctaattaaactaaagaacgtttgcacagcaaaaggaacagtcagcagagtaaacagacaacccacggggtgggagaaaatcttcacaatctatacacctgacaaaggaataatatccagaatctacaacaaactcaaatcagtaagagaaaaacaaacaatcccatcaaaaagtgggctaaggacatgaatagacaattctcaaaagaagatatacaaatggccaataaacattaaaaaatgctcaacatcactaatgatcagggaaatgcaaatcaaaactacaatgcgataccaccttactccttcaagaatggccataatcaaaaaaatcaaaaacagcagatgttggcatggatgcagtgaacagggaacacttctacactactggtgggaatgtaaactagtacagccactatggaaaacagcgtggagattccttaaataactaaaagtagaactaccattgatccagcaatcccacttactgggtatctacccagaggaaaagaagtcattattcaaaaaagatacttctacacgcatttttatagcagcacaattcacaattgcaaaatcgtggaaccaacccaaatgcccatcaatcaacaagtggataaagaaactgtggtgtgtgtgtgtgtgtrtatatatatatatatatatatatatatatatatagtatagtttgaagtgaggtaatgtaatgcctccagatttgttctttttgcttagtcttgctttggctatgcgggctctttttttggttccatatgatatatatatatattccataaaaatatatatattccataaatatatatccacaaaatatatatattttatggatatataaaatataaatatatagtacatatatccataaatatatatatattccataaaaatatatatattccaaaaaatatatatatattccataaaaaggaataaattaacagcatttgcagtgacctggatgagactggagactattattctaagtgaagtaactcaggaatggaaaaccagacatcgtatgttcttactgatatgtgggagctaaactataaggaaacaaaggcatgagaataatacaatagactttggggacttggggggaagagtgggagggggacgagggataaaagactacaaatatggtgcagtgtatactgctcaggtgatgggtgccccaaaatctcacaaatcaccactgaagaccttactcatgtaaccaaataccatcggtacccccaagaacttatggaaaaataaaaataaataaataaaatctgtgtaagaagtagctggacctgctattcccctcttccactgtgtgggagacaggaggatttttctctggagagctaaagaagctttgactgaaggaccccaagaacagaggagagcagggaygaggcactgaaaacagagattaagaaagtatctacgtactaaccagggagaccccaccagctcctttcccctgcacagatactggaactccagtagccaggttatgcttgcaggcaggatattgaaggagtgtaattcttaggaagaactaaactttcccggaaaagacattggacatgggctcactgcctcgtcaaccagcagtgcagcccagctagcagtagccccctcaccctgcccccacagaactgcctaatcatctttctgttgcattactcttaaatctgaacaaacatgaagaatcaccaagcacctgaggaacgcctcctacaggaaggatcatcaaaagaaaagaagcatcaactcaaaaaacagaagaggccaggcacggtggctcacgcctgtaatcccagcactttgggaggctgaggtgggcggatcacaaggtcaggagttcaagaccagcctggccaacatggtgaaaccccatctctactaaaaatacaaaaattagctgggcacggtggtgggcgccagtaatcccagctactggggaggctgaggcaggagaatcatttgaacccgggaggcagaggttgcatcgagccgagattgcaccattgcactccagcctgggtgacagggcgagaggcgagactctgtctcaaaaaaaaaaaaaaaaaaaaaaaaaaccgggagaaatgtttttaatgtatcattaatatcctcagagagactggagaagatattgtatccataaaacaagaatagtgtactgttttaaaagaaaaaaagaatcagacttgaaaactaaaatgatgtttaaaaatctttaattcatagaaaagttggaagataaagctgagaaatcttacagaaagttaaaaagataaattgatggtcataaagggagagtagataggaaaattagagactaatcaaagaggtcccatatatatttaattggaaatcaggaaaagagaatagagaaagtggagaggaggaaatgatcaaagaaatagtacaggaaaacatccgagggctggacagactgaaagggctaatggagtagccaataaaattagtgcaggaaaaagaaattgtgccatgatgaaatttaagactaccaaaaaaagatagtgaaagtttgactgtcagtagcaacactgcaagctgaaaaacaaaggactggtgctttcaaaattctagatacaaattattgcccatctagaattctatatccagccaaatcatcactcagatatacaatattcagatattccaagtctccacaaaaaaatagtaaaaataaaattaaaaaaacttaccatgtacatactccccttcgggaatttactaaagaaaatattccatccaaacagaatgaaaaaaaagcagaggaaaacacaggatcaaggaaagagagacaaagggaccccccaggcttagaaaataactagtccagactggagcagaggagacaaagaagcataatggaaaacaggaaattccatgagcagatagatttcaccatgaggaaaattttagaggctgttggaggataaggggaaacttaccaatagaaactaaggaaatgaagcaaattggaagaaaggcaattaattccaggaaaaataaaaatttgttcatagtgtattacttggctcctcagtgttgtattatgggcagaataatgtgaacactgaatattggtttaaccaaaaattgtgatactggaaaaatgggagagagaataggaaagaactgaatcctcatctaccacaataggaaatctgaaattgacgaaacaagagaaagaagtataagcatttaatttagaatttaatttagaaatatgcagatagcaagaagcagctacaagagttaactgtctgcctctgggtggtaaactgggggtgaagggtgggaacaggtagatggcgtgaatacagcattgttcacttaagggtctttcaggactatttgtttcttatcttacactatgtgtgtggcactctctctttgttgctttttttccttttttcttttttttgtggggggtggaatttattggtgggcatgagtaaggaggggcagcacagtggacgccctctcaagtgcagggctttaaaaaaaaaataaggaaaagagctctctgaagccacattgattcagatttgaatcttggagcaaccgttttgctacctttgtgatcctgggaaaataattttaagcttcctgagtctccatttcctcaattgtaatatgaggcaaatacttttattagctatcacctttcatagggttctttagaaacaggtcaactgcctgacccacagaaaagccttcaatagaagctttctgcctgtgttaattacctggcacccttcattcctctctggasatcttgacctcttgctcctcatcagtcccccaggtgtgtttgcatgtttcaccttagctctaatgtgacgaagaaggtttttttcttgtttaaaaaaaataagctggtgacccttgatctagaaatcagttcctctgaggagtagctttggtgatggagaaacactgttcgccctatgggaaaggaaaacttgagtcatactctttcagccactggtgagcaaaagcttaggtgagaaccagacatcttagaagcctccaggatctcccatttgtgcccacaaacatttccagccttaatcccttttgctgatgtaataagattcttcagctggatgatgaaaactgagcccatggtgttgtgattatgagctcagctacctgctactggcaggtgatagctgcacctgtgaggctggtcagcttcccacacacccagggtgcctgcggcctcctgcaccctaagccctgccctgacctggccactaattattgaacagggagtgaggtttcctggtagagattatctattttactgccaggattatgctctatgcaaagcacaggtccaggcactggggatgacatagagatacatgtacatttggcctcaaaggagtttaccatttaatgagggagatagataatcaccatccaatagacaaggaaataaacgaagtgggtaggagaagggctgctggcgggctgcatgtgggataagtaagaccttgggtctacatgtgggaatgctgctttggagcttccattgcaagcctgggagcaggtgagcacccagctcaggtgatcttctttaagcaaaagcaagtcttcaaatatgtgtgatgttttatccttggggcggcagtgggagggggtggtctctgaatactgacagtccttatggaagaggatagtgccttgtgggcagggtgaccctacaattcaktatccaaacagggacacttgagagtgaaggtaatgaaagataaccagcattccaggacacgtatagccagggcttgccctggcaaaccagacatatgatctctggacttaacgggagcttggtaattataaagcggggtagagtcagtgacctagggaccagaagagaatagattctggctgggcacagtggctcatgcctgtaattccagcattttagggggccgaggcaggaggatagcttgaggccaggagttcaaaatgagcctgggcaacatagtgagaacttcatctctacaaaattaataaataaattagccaggtatggtagcacgcacctgtagtcccagccactcatgaggctgaggcaggaggatcgcttgagcctgggagttaaggctgcagtaagccataattgcaccagcctaggcaatggagcaagaccctgtctcgaaaaaaaaaagagagagagaaaatagattcctactcagtctgaatgtctaggtctcatgcaggttcaaaaggcttctcaggcagctcccccagacaccctgggtaagagccactggcggtggggtgggggtgggctggtctctcttgacacatttcctcctcagaatgactgctcaaggggcccattttcaccagtgaccagcatcagtccacctctctgggtgggactcctcaaaaagccgcatatgttctggccaagctacttaaagattaaatgtttattttctgcttccctggcgccttagctcctcctgcatggaaaccaattcagagtttgccttggtgtggtttttaattgccatgccaaagtcccgtacccttatagtgcttttcaaagagtaattcttattccaaaaccacttcacagtgatttcacagtgtaagaaataatatagaaaaagctctaaccaattgctgttttatcaaagaaattaacagttgatgtgagaggacagccctaatgacctagcactgttaccccatttcattctgtatcctgatagaataaaggtcatagagtaacagaatttacaacgtaaaattatacctatttatttgtctcttccaccaacctgtgatttcctggaggacataaattacattattaacataagatattaaaaccatcaccgggctggtctgaaggtagtgagttacctcaattgattgttcacagttatagatcaaacttcttgttctactctttcccctcttctcactactgtacttgactagtctttgttaacaattaaaaataataaaataaaataaataaaaccatcattggcatggacatatttgtggggtctcctaaatgactgtggttgaatggaaggcagcctggtcatagccccacctctcttgctgacaccagagagactcctttcagtccttacacccaaaacagactttcctttgtgatctttacttacagcaaatcatattcttcccaggccacctgaggcaactgggaggtggcctcctccttctcttcccctccccatcccactgggacagttttgttgtctcggttcagctctgcctgatcttatgaacactggagtctacctgttaaatggggcagggcatggtcaagactcttccctgcagttcccacaggatccaactgttgctctttaatggctttgtggaaaatggctttctctctctctctgtcgctcactggactgtgtttcctgttttcttctttattgtcataaaaatcctagacactgctcagggtcccactggtagtagattgtgcccatctctgacagatctttcccatgtggctcttcctttctggaaattcaccagtgttcaccagccccatcaagaaaactatgaacatattatacacattattctaactttagattggatatggattaaatgttggcatcacctggttctgtcagattgcctcatctggctccttagaaaccaaaatgggagaattcacatgttttggttgttaaatcatagttccagctgtcagaccatactgcttgtgctagaggaatagggaacgatgtgtgtgggtggcagraaaaaggcagacactaaggggcatttataaccaacataaatatgtaataaaggcaatgtcagtataaattaaatacatacaaaataaaggcaattattaatatgtaagcataggctccagagatgtttcagtttggtctccttcttctcccccaccacagaaaccaaatgaccgtgatcataaagtgagactggcactgggaaatggcttacgaggagatgtgtggagacaatttgtcaagagatttggggacatatgcatctatgagttctatgctgccactgaaggcaatattggatttatgaattatgcgagaaaagttggtgctgttggaagagtaaactacctacagaaagtaagtacattgaaaaatgaragcatacgtagccagttttcagaatacagagacttcttaaaagccaagtcatgatgatgttatcagaagtcaggcagcatcagagccatggcccattcctatcaccaagagaagttttgctcattctctgtgatgatgacttcaaaaaatcagatcctccaattaaaagcatctcaacttctattaagaacaatccattgtgcccttgccatctgcaacttaggtgaagtcttcctgatgccatttatacttgcatgtgataaaacacctgaaggttacaagttccgtaagctaatcgtacactgtgaaacatagtatttccctttaattgtgtcgtgcagcaccatcacctggggagttttttttatatgcacagatgcaaggaccaacccgctaggctttggattcagttgttctgaggtggagcccaggcatctcagtgctaggatctggtgaacatttatgtctacctaataattccaccagaaagatatttgtaagccagctcacatagccgtctcttttccctgtcagtcattttattgctcatgggtctctgttgtcttttttgtactcaagcagtcagtcttccagataaccaacaattctgcaaatatccagaaatgttcagcaaatgctgagcctcctttggcttgagaagtcactgcggtcattgtgcctctgggcagctcatcctttctggccatgaaacagccgcaccagaactcccacgcaacctgtgtccccagggacaggccagcagaatacagaggacagtagttcatgtgcgtaagagccctggctgtggagagcaaatctcagtgccaccatatgctagctgagtgaccttgggcaggtcacatatgytcctcaggcctcaatttcatcatctgtaaaacagagataacaagagaaaatattgaacccagtgcctagcccacactcgataagggaaaaggattgttgaaaggattaaacagccaggcgcagcggctcacgcctgtaatcccagcactttgggaggccgaggcaggtggatcatgagatcaggagatcgagaccatcctggctaacacggtgaaaccccgtctctactaaaaataaaaaaaattagccgggcatggtggcgggagcctgtaatcccagctactcgggaggctgaggcaggagaatggcgtgaacccgggaggcggagcttgcagtgagtcgagatcgcgccactgcactccagcctgggcaacagagcgaaactccatctcaaaaaaaagaaaggattaaataacttatgaaaaggcccttagaggctatagcccaatgcctgtcatttaacagccttgaataattgttagccgtaatgatgataatcactctatttcttatattctggcctaatctcaaggtgttcccaagttcaaggaccctctctgacaatgacagctccacctacgctacacaagtccctccacagtcctctagacctgcgctgtccaaacagtagccactagctacatgtggctacttaaatttaagttatattaataaaagtttaaatccagttcttcagtcacactagccacatttccagtgctgaatagccacgtgtggttagtaactaccgtattgagcaatgcagacagagaatatttccatcatcacagcagattcctgggcagtgctgctgcagactgagaatcgatctcctacaccccactggaactgctgctgagggtcagctaatgctgtatattacccattctttactttctcatccattgattgccatattttattgtcagtttttctactttaagcaaaacattaaaaaaaaaaactttaaaaaccggatgatcccatgcaattgatgtagaaaagaacatttattactacctataaattttttacattcctgcaaataagatctacatttgttgaccataaacaccacttgtttttttaacaagtactagctgtctgctaatactaaagcatatgattgtttgcttcatcacatagacttgaatataaatttgaaatagacacagtaatcatggctaataattatatccaaatactgtcatgtttgcatttttcttccaacaaggaaaataatatatttattattgctcttactgaattgctgataattaaattctyatgctttgaattatatgttaaatatgatagagttttcataattttatagtcatgggcatgaaataattatggcttcgattctaaaatatattagataacatttccttagaaacatgaaaaatctaatagtgtcatattaatataaggttatacaagattttaaaaacccatttgtgatacatccaccaaaagacacaagaatgttcataacagctttatttataataggccaaaactagaaataatccaaatacccattaacaggaaaatagataaataaatcgtggtatgtttatacaagggaaaattgcatggcaataaaaaacaccaacatggatggatgaatattatagacatatttagtgaaagaagcagacacagaagcatacatttatttcatttatttgatatttaagattaattgacagcagtataagtcagaatagtagttaacttcacagaaaagggcaggaggaaactttctaggtgaaatgaaagttttctctgtctctctctgggtggcagttttaagggtatatgcaaatgcaaaatttcttcaacctgtacgcctaagatatactttgtgttataccacaattaaaaagggaaaaattataaaagatttatactcaaaattattttaatcttgctagaaaatcataacttatgacctgattaaatatgatgtggagaaagatgaacctgtccgtgatgaaaatggatattgcgtcagagttcccaaaggtacagtggacttttgttcaatcaacctgtgccccttcttatcttgatcaagtgacttttaaggactaacatattattgccacatggtaaaatttatcagagtggggaaaaggggggtttatttaagtaccctccaatatacaggaattccaaaggtgctaatttaccgctgcatgtaacataattctagttttaaacatagcttaacaacttcttgcttatgaggtaatgttttgtgggaagggatatgtaattgtggttgcaaaactatagttttaggtggcctttacctttaagctttaacaactgtgcgtttgtgtaagtgtgcataaatcattattcagtaaaaaattagcagtaaaagaattacaggccaggtgtggtggctcacgcctgtaatcccaacactttgggaggttgaggaaggctgatcatttgagataaggagttcgagaccagcctggccaacatggcaaaatcctgtccctactgaaaatacaaaaattagctgggcacgatggcacacacctgtaaccccagctacttgggaggctgaggcaggagaatcccttgaccatgggaggcagaggttgcagtgagccgagactgcaccactgtactccagcctgggcaacagggcaagattccatctcagaaaaataaaaataaaagtaaaataattaggccatatacaataatgtacagtatatgtgtgtgtggtgtatgtatgtgtgtctgtaatatatatgtacatataattcacaggtatacatgcatggaaaatgatacttcctacagccagcttgttgccagcaggttgtatggcattagttttaagagaaggttgatgtataaatttgacctctagcacataaaataagtttactttcttctgtcttaggtgaagttggacttctggtttgcaaaatcacacaacttacaccatttaatggctatgctggagcaaaggctcagacagagaagaaaaaactgagagatgtctttaagaaaggagacctctatttcaacagtggagatctcttaatggttgaccatgaaaatttcatctatttccacgacagagttggagatacattccggttggtttttctgaatcattgagccaaaaacaaacacacgcacagtttggcttactcctagtggaatcgcattccactttggttatggtgcatttccttctctatctttggcacatcaggtcaaactcctgtgttcccagagaatgaggaatgaagtgcatgaagtgtcactctgcagtgcacggttaacttggctgagcaacaccagatgagaataaggcaggaaacctgtatctgatttctggagacaaaagtacatttaactcctcttgtttctcctgcattattactggtcactcttaggacagccaaggattttcacctttccaatcatggaggtgtttagataaaatcagatgcaaattaatgtggagctgatctagttgaagaggaggtgaggggttcggagccccttcccccaacccctttcatccccaaccagatggtttcccacagaacccccaggtcagcacaaggaagtttggaagtccttctaacagaccatggaattaacttccaaccatagcacagtcctccagcctcatgacacagcttccttcctgtgtaaactccctgagggcaggccctgtgtctgcctgttcacccccagcacctaccatggtgcctggtgtcattttttgcatgaatgaatgaggaagggatggaagttgtctaactgcagtagaaagacagcaggtggaatgaggagaaccaggctcacctctcccactgagcagcagtggtatcaagacagataaccattctggacctcagtccttttgcccttgagatgtgggtcacgatgattctcagggtccttccatctctactattccatgtcttaagatccatatcactttatgccatcttcatgttattaagatgatacttctgggagggctaaagaatttttaatgggccaggcgtggtggctaacgcctgtaatcccagcagtttgggaggccgaggcgggtggatcacctgaggtcaggagttccagaccagcctggccaacaaggtaaaatcctgtctctactaaaagtacaaaaattgctggacatagtggcacgcgcctgtagtcccagctacttgggaggctgaggcaaaagaatcacttgaacctgggagacggaggttgcagtgagctgagattgcaccactgcactccagcctaagtgatagaatgagactctgcctcaaaaaaaaaaaaaaaaaaaaaaaagaatttttaatgaaaacaaaatttaactctttattaagtgaaaaatagcacctggttgggccttaacattagaatctccctgtaactaaagtgtgattttttttttcctttcttgttgccgtgagaccctgaaataaaatatgaagttctattaaaaagaacttcagaaactgaattaagtagcaactgagttagtaaatgagaaattgagagacctaaacagcagaaaatcgttgagatttctttctaatttccactgcctttcttagctagggctgtattttaacattagaacattattctgtgtattgtgtttcatgtggcaacattgaaattccatattttgttatctaggtctatacttttcccttttatgcctcaaacaagataccccggccaggactaagttggggagtttgaggggccaagatgaggaacacgagatcaggatcatgcagaaatctaaaggaaacaccagctctccgacattgcaacctgggccagaaaccaccagtgacctctgctaactttgtcctttcttccaggtggaaaggggaaaatgtggccaccactgaagttgctgatacagttggactggttgattttgtccaagaagtaaatgtttatggagtgcatgtgccaggtatatacaagatatgatctgtacctaaacccatagagtaactgaacataattttggcctcaaggcgaagtttgtcattgctttctcccgccatccagagttaaacagttctttcagctgccagggagtaaggagcttatgtctggcttatgttccactataaaagccaactcagtgcatctgaacatggccttctcttcatttcagctcccagccattcttgggctctcaggcaaacaaagtctcaaatatgggagctccatgccacatttggcacacctcgagaaaagtcgtgtcatgcttaagagctgggaaatgatgtcctagcctctgaactaggaggcaaaaagaagagccagtgcagttgctagaagaaaaagctggggaaaagtggattttgtacagcctcttctttttaagatttctaagcccagttcaccacactaagtttcagaatcatcacacaagaacgttgtcaccgcagcttcatctgcagatccacttctgccagcagagtcaggagggccagtgtctgaccttgaatcctggcttcaacatctgctggctgtttgactgcaggcaaatcactaaaattaaggataatgccagccctgcagttaagcttgtcaagagaacaaattcattttaattacatcaacgctaagcatatatttatcaaatatatatataagggttgttgtgacaataaatcacattaataatagacatcagagaggattccagcctcaaaattactgtccaaatataaggcattaggggtattattattcccccacaactcatatttgggattcccacccatattcaaagtagaaatctaaaagtccctttttcccaagctctgacacttctacatggccctgtgcttgttattttttaaagaatattcaaggccgagcatggtggctcactcctgtaatcccagcactttgggaggccgagacgggcagatcatgaggtcaggagatcgagagtatactggccaacatggtgaaaccccatctctactaaaaatacaaaaattagctgggtgtggtggcacgtgcctatagtcccagctactcgggaggctgaggcaggagaatcgcttgaaccagggagtcggaggttgcagtgagccgagatcgtgccattgcactccagcctgggcaacagagcaagactctgtctcaccaaaaaaaaaaaaaaaaaaaattaagtccggacactgtggctcacacctgtaatcccagcactttgggaggccaaggcggatggatcacttgaggtcaggagcttgagaccagcctggccaacatggcaaaacttagtctctactaaaaatacaaacattagccaggggtggtggctcccatctgtaatcccagctacttgggaggctgaggcaggagaatcacttgaacccgggagatggaggctgcagtgagccaagatctcaccactgcactccagcctgggtgacagagtgaggctccatctcaaaaaaacaaaaagaatattcaagaatatctcttgcttgttcctccccaactcagggacaatgacacgaggggaaatatggccacatcttgatgtgagaggggacagaatggaagggggtgtgaatactcccattggagaactccccaggccttatgctgagttaacacaagggtctaagttgtggttgtcagccattgtgccaccctacgctcttgcagacccttcctcaaatgttgtgtaaacatctaaatgcttgattttaaaaagaagaatcatacaaaagagtatgtgtgaggtgagagaatctagaagatgaaacagaaggatctagcctagtgttcctcaaagtgggtccccagatcagcagtgtcagcatcacccaggagtctgttacaagtgtaatttctcaggcccaccccgaactaccaagtcaaaatctctggggtggggccaggaaactgtgctggcacaaacaccccagagattcttaaaaacattggaagtctgatttagggggtgatgaaaatgcactagaactagatcctggtaatgatagtacaacattgtaagtgtgtaaaataccactgaattgtacacttttttttttttttttttttgagacggagtttcgctctcgttgcccaggctggagtgcaatggcgcgatctcggctcactgtaacctctgcctcccatgttcaagcggcaattctcctgcctcagcctcctgagtagctgggattacaggcatgcacgaccaggcccggctaattttgtatttttagtaaagatggggtttcaccatgttggtcaggctgctctcgaactcctaacctccggtgatccacaccccgaccttggcctcccaaagtgctgggattacaggcatgagccaccacgcctagcaaattgtacactttaaaaatgagttggaatgataaattttatgttatgtgtttatcacaatttaaaaaaaaacacacacactgaagtctgagaagcactaaagcccagtggttccaaaaatttggccaatcatcagaaccatctgggaaactttttaaagcctggatctaatggaccagaagctctggagtatgggactcagaatctgcatgtcttttttttaattcccaagtgaatctaatgatcagtgagttctgggagccactgaaacagaacaaagggaaggagattgacagtcttacagtgttggcagacagtcagataggatgaggagcaggtgtgttctgtgctgctccagtgatcagaactaaaaccaatggattaaaatgaccagggagccagttttagcctgagaactcccctgtaaccaaaggaaccatcaatagaatgggcttgtctcccaggataggaaatgcccccaccaactagggcatgtaaagagaggctggatgtccacctgggatcctgggagaactcttgcagcagtgaaagattagagataaattctaaagtccctcccaactttcagattctgtgattcccagtgccacaactgctgctgtctggccccccatccacagaggccagtcccattccagactagaaatgcagcagtactgtctgaagtaaggcatcattccactatgggtgattctgcacaaggcaatcacacacctcagctttggaacaggagagaatttccaggtttgggcctggagaggagttcactttttctaggtgtcacacctgaactgcccaactactctgtagaactttctgcaatgatggaaatgttccatatctgcactgtccagtatgatagccaatagccaccatgtcactatggaacacttgaaatgtggctagtgcaactaaggaactgaatttttcataatatttaattataatttattttagttttaatagccacaaataaccagtgggtgtcatattagacagtgcagctctagagaacccttggccaaaattgacctttacaattagcccagagctcctataggctggaaccattccccctgaagctgaactagtcccaaaccaccctccgagagttggggcagaggcctgagacctgacaggcccatttgcccgtaggtccagcgtcgctactaccagagcaagaagcaaggagacggtgaatgtggaggatttctgttgcatgagccttaattctaaaaggagcttattggagacacttgagatttctaagacaggtgctagggaccctaaactaagaggatctggtgccactgcctctctccctcagacaagaagcaaaccaaatgagggggcatctttttttccttttgctgtttgccttctttagagctataggtaaacacacaatcaccataggagagatttcgaaagctggggcccaggtaaccaagggaggctcctgtctcctctctgattacagctgagtagtttagggaagtggaactggactcccgctgggtctgctggatcaggtagaagatacattaatacctaattaccactgtcctcacaagaaggcagtggtaattgttggaaacttctctgggctaaattccctgatgtaggatctgttctctctgtggagagcacatcctcttgggactaatgggccttaatgggagggcacaaaacagctcctccctgtgcctgccttcacctcctgtcccacatcctctccaaaatgcagacaagaaaagccattagaaccttgattagataagtaggtctccaaggtggtatttgtgcccagaagtgcaacaaacctgacattgcaacctgaagaacaacccaagctcagtaagtcatgcatggaggtggagcaaggactttcactggagtctaaagtaacttcctgtagccaccagtccaacctactccctactaagatgtgtttgtataggctgctagaaagaaggatgatggttataagcacaggatctggagccaggctgcctgaattcaattctgtaccctgcctagtatttgctgtctgaccttgaataagtctcttaatgtctttaagcctcagtttcttcatctgtaaaatggaaataatatctacatctcttcagaaggttgttgtgaggattaagtgagatcatcaatacaacacacttagtatagggcctggaatataataaagattcaaccaactgttattattgctattagtattagtacaatcactttacagtatcttcatgtatttttaataaaaattccagctatccaaatgaaacccatgctataaatgttgtctgagcccacagttctttgaactaataaagcatcataaatagccwtaacacttctaattttttctcactttatttctagatcatgagggtcgcattggcatggcctccatcaaaatgaaagaaaaccaygaatttgatggaaagaaactctttcagcacattgctgattacctacctagttatgcaaggccccggtttctaagaatacaggtgagatctcttattatccagttcaatgatctgtcctcttggagattcctaccwcttagggaacaactcgccttctcccaggatgactacatttgccaagttttcaccgcactttccaggaagctcagaaaagtgtcatagaccaataaggaagtggtaatatcaggctgggtgcggtggctcatgcctgtaatcccagcactttgggaggccgaggtgggaagattgcttgagctcaggagtttgagaccagcctaggcaacgtagtgagacttcatgtctactaaaaatgaaaatttttaaaaaaggccaaacgcggtggctcacgcctataatcctaacactttgggagacagaggcaggtggatcacctgaggtcgggggttcgagatcagcctggctaacatggtgaaacccggtctctactaaatagacaaaattagctgggcgtggtagtgcatgcctgtagccccagctactcgggaggctgggacaggagaatcgcttgaacctaggaggaggaggttgcagtgagctgggatcacgccactgcactccagcctgagcaatggagtgagactccatctccaaaaaaaaaaaaaaaaaaaaaattagccaggcatggtgatgtgcacttgtagtctcatctacgtgggaggctgaggcaggaggattagttgagcctggcaaatcaaggctgcagtgaggtatgattgcaccactgtactccagcctgggcatcagagcaaggcccagtctaaaaaaaaatatatcagaaaacagctagaagaaatccaatcctaatccctttctccttacaatgacaggccagttcattcagcaagagacttagcacataactcacaaagtctgtttggtgagtcctgacagatagcgcaaatagaaatgctctgaccctgtttgttgtttccagttttaaagaacacagaaatccacagaagttctacacctttctgtggtgtgaaatttaattggacattagccagctggaattgcctaagacttaactatcaccgctaggaggattttttttcttcctccaacattaaccctttggttggtttaatactctcacttttagactttgagctctgtgattctgtagctgaagacttgacaaaggaggtcttaagattccagatattgtgtgtataggattattcctgttgatgttcatagggcaccaacatttgctttgcaaccagatggtaaagtggcatgaaaatgaaatatcctcagatattttgattaacacataattgaaggaaaaatcagtcttcaatctaatctaatagacaagcagactgagaaaacagagttgtctgtaaatgatccctccttctaatcccaccatgaatcaggatatcctagcggtacctgaagccttaccaagaaataggcaccacccctctgctcagaaatctatgcacaggtatctcatccttggcaggtcctccctccccacaggtgatcctaaagctttaagggaataaaaaatacctcacaaagggctccctaatggagatcctgcaaacagaatgtatgggtatcatataaaactttcacttcgctagaaaatgtaaagagtggatgttacttgcccctaccacaaaaatgatatctatatgaagtaatccatttgctaactagccaaactattccacgatgtatatgtacttcagcacatcatattgtacatgagaaaaacacacaatgttatctgtccatttaaaaataaattaaaatggaaaactttattttaactttcacttcccagctctcacatgagccagggatgctaatgatttgctagatccccatgccccacccctaccccttgctctgcatcctaatctattgcaaaatgcaaccaaaatgtggattatttgatgtttttcaggacaccattgagatcactggaacttttaaacaccgcaaaatgaccctggtggaggagggctttaaccctgctgtcatcaaagatgccttgtatttcttggatgacacagcaaaaatgtatgtgcctatgactgaggacatctataatgccataagtgctaaaaccctgaaactctgaatattcccaggaggataactcaacatttccagaaagaaactgaatggacagccacttgatataatccaactttaawttgattgaagattgtgaggaaattttgtaggaaatttgcataccmgtaaagggagacttttttaaataacagttgagtctttgcaagtaaaaagatttagagattattatttttcagtgtgcacctactgtttgtatttgcaaactgagcttgttggagggaaggcattattttttaaaatacttagtaaattaaatgaacaccaacatgtgagatggcactgtctctgtgttctttcctcactttactctaaatacaaagcctgtgtcaattactccaaagcctgaagtcctcactggtaacttttcataggtgtcccattcgtaagagtaaagacgttctaggtaaaaatggctgggaacggggggtggggtgagggatggtagggtgaggcggctagatcagcagtggccaacacaatggaaatctactccaatgtgaggaggccaactttccctacccggaggcatcctgtccactgtgtataggtagcattatccaacaggtaataatgccatctatagtccttacaggagcctaattctatggcatcagagttctgtacacaaaaggtgttcaggccgggctcagtggctcacgcctataattctagcactttgggaggccgaggcaggtgggtcacgagatcaggagttcaagaccagcctagccaagatggtgaaaccccatctctactaaaaaaatacaaaattagccaggcgcagtggcaggcgcctgtaatcccagccactcgggaggccgaggcaggacaatcgcttgaacccgggcggcagaggttgcagtgagccaagatcacatcactgcactctagcctggatgacagagtgagatgccgtcttaaaaaaacaaacaaacaaacaaacaaaggtgttcaatacattttagctactttaggggttgcaaactcaagtgtcttcagaattcacataggtaatgtggatgagaaaagcaggtcacaaatgaatgtggtaaacttggggacggccactaagcttcagtcagctaaatacaggccaagtattgctggaattttttaattattcagaaaacagaaatccatcagaacttattaacattagtgtcactaaagttgatctacaaccaccccccccgcccacatacacactctcacaactacgaagtttgactggctttttaaaaagaaaacaaatccagatatgtatgtgaatctcccaatttttgaaatctgaagtctcaaaatttttaaaacttctatgcatcccaaacaaaatgtgtgtctgggccagataaatcccagctgtccagttagcacccgagtcccacttacatgtgcccctactcctcagatggcaactggtttcactccaaagccagtctcctgcccacggacccttttcaaagaccggaggacctttagggtggcacgggaggctttgggaaattctgaggagctctttcacataagccctttctccttagacccagctgcctcccttcctgggtttaattgctttacctctgcatgtatgagctgcaacagaattccaggagcaggtcatgggtgaaagcattcaagacgacatgtaccttacctagagcttgtcctaggcatgggagcatcatggtcattgagttcacatccagaaagcatggcccaagtttaccacagcctctctagaagtttctgtcatggagtttccttccctagaggacatcttcagatgaccaggagctggtaatgtgtgctaattctcccccagtttagtccccataaagccccaggcaaacacttctaggacttctcaatgatacatgatgagaggtgttgccacccccagccccaacagagtactagaaatattttttttaactctctccactcttttgggtgactttaagaagaatcatgaccaaaatccttgcccccactcattatacctaacaataaacatttcctgagtgcttaatatacactgaggacttgaggagggtctaaagaaaactctagataggctgcacctttgtgaattttgccagtaattagaatgattattgtttgtgggtcagcacttgcgaatttttgcaaaattctctctgcctttgagttacaggagaatgtgaacctaagtagtgggagataggacagcctttgagtatcacattgtgcaattgtgttacctggaatcttgtcaaaggagaaggttgtcagcaggggtcatgttagagcagtggctgcattctgtgtcacaaggggtatctttttgggtaagaggtcagcatttacactgttggccagaatattcgtgttatattaaccagaacctggttgccctgatctcatttgacccatgttttagaccttccagtcagaaactcagagacccaggtcctcgcatccacaccctgcccagctctgcctcccagcctgatggtttcctcagtcttccacttccccacacctccctgaatctggccaggtaacacagctccattgagataaatagagacacccccacaatgtcctcagcccctaggtttgcatgtatgtaaacaattttaagccatcacctgtgagagataataccttaaagactgatttttctctttgaaaagggtaagaaattgtgcccaagaaatatctgcacaagtcattctcatttgaaaatataagtgaatttaaaaaaataagctgatatccatgtaaattatccaacagggctttgatttcaaatgtattgtttggaaacctgtaatcagtgcatagatgggatgctataggcaccaaaataatttggggataaaagtaggaaatgtcagcctctgaaatggatgctaatgagaatcagtattaaaatgggtaaagttagccaggcatggtggggtgtgcctataatcccagctactcgggagactgaggcaggaggatcacttgagcccaggagtttgagtccagcctgggcaacatggtgagatcgcatctccaaaaaaaaaaaaaaaaagataggtttaactaactgcagtgactcaacctaagagataatttgctaaatgtgtcgttcattcatacatccaccctacaagcacttagtgggtgcctgctacgcaccaagaaatgttctcagcacaagagtgctgagtcccatccccccaaactagaattggagtttgcatttctaacaaatgcccaggtgaggctaatgctgtgggacgggggccacatttggggaatcactgacatcctgagttatacaacatgtgcacttacttagtgggtaactcagttcctcagagccaggtcatcccttactaactgaggctcagctcttagctcaagtggctcaaagtgcagtccccaggaaaggcccagcatcaagaagcaccttgtcatcacacaagcctgcaattgctcttggaaatttacatcaattagagcttatatctgcttgctagatacatacacatatattgtgatttgctatagcaaacgaaaagcaatcctagagagtagctagtcaaacctctttacttgataaatgaaaaaactgaggcctgaggttaagtgacatgactgaagtcacacagctaattggcatcactaagctctcacctagtacttgcaggaagagagtaccatcatagaccagtagttctgagtgtggtccctgagccagcagcatcagcagcacctgggaacttgctggaccaacaaattcttggaccctgaaaaattctagacctactgaatcagaaacacagagggtaggcccagacatctgtgttttgacaagccaaagccctcctggtgttactgatgtggactcagtttgacaatcactggcttaaagcagtgcacaagctttactgtgcatgagaatcacttggggacaccagtgctttgagtgcttggagtgcagtgagtgcttggggcacacacactgctttgagtagcatgtcaatctaaagcagtggttcccagatgtccctgcacattagaatcatctggggagccgtcaaaaatcccaaagcccaggcccatgccataccaattagatcaaggattctgggagtgagaaccaagcatcagtatttttttaaggacctccaagtgattccagtatgcagcaaagctcagggatcactagtagagaacaagtggctagttttcagcttttggccaggtgcagtggctcacacctataatcacagcattttgggaagccaagacaggagatgctcttgagcacaggagttcacaatcagcctaggcaacacagagagaccctgtctctacaaaaaaatttttaaaattagccaggccaggcatggtggctcacgcctgtaatcccaacactttgggaggccaaggcaggaggatcacctgagcccaggagttccagaccagcctgggcaacacagggagaccctgtctctgtaaaaagttataaaaattagccaggcatagtggtgtgcactcatagtcccagctactcgtgggactgaggtggaaagacagcttgagcctcagaggctgaggctgcagtgaactgtgttcacaccactgcactcacagaatgagaccccatctcaaaaataaatagctacttgggaggctgaagcaggaggattgctcaagcccaggaagttgaggctgcagtaagacatgattgtgcctctgcactccagcctgggaaagagagaaagcactagtctcaaaaaaaaaaaaaaaaaaaaaaaaaaaaaagctttaaactcttaacaaagattcttttctcgaccaaactctagctaagctcctccgagcccccttctcaactaggcctcaacctttgcctataaagacttgaacaaacactaacacagtttctcacagctcaaggccacatccctaagttgatcctagctcaccttaaagtgcctgcttaagaaaactcaaagctgccgaaagaattaactgtttgttccagcgaacccctgaacacagggccctgactcccagtctctgtgggagggtaagagtcttacttcaaaaagcaccagttagcaaacccagaggggtttcacatcaaccactttccgctttttgtaatttttcacattcctgactcttctaagtctaggctggccttctccctattctcccattcacgctgtgaaatgcctagtcacctttgcacaaatccaagttgagttcagttcacatgggacccttttccctattgtgatagtatattactgtttaacatctatccttaaagttctaactaatgcccagctttgtttgtctttaatactctttacataacccatttcagagtcacaacctatcaaagtaccatctgaaatggaaataaaattatgtgtttggcctctgaactaattatgggcaagccacttgtgagcatagcttttatttgactaccgggtccaggaaaataaggggaaaatgcacaagttccaaacctagaaaggaaacatttaaatgtactggaggaccagagcagcctgctgggctgtgagctcctgttcaggtccaaccttgagcagtactgcatggtggaaacagcctgggcttcactggaagccaggagacctgggtttgcctatttaaagctgtgtgacctaaacgttggtttcctcatttatgaaccatgagccacagtgcctgactcataattgatgcttcaaaaaaagtacatatgtttaagctcccagactggttaatcaatgtttcagcagccaattaagtgacacagggtatgttttgtttcagggacaagcataatttatttctgtgttatatatcatgtcacaagctgaaccacagaagctgcctgtctaccctcggccctttctcactgaccagactgctgaacccatctggatcatgctggcttaaactcttcgtttgtatcctattgtgggtcatgaacccctatgagaatttgattaaaattatgaactcgccccaagaaaaatgcatgtacacataagcacacaaagttggcatacaattgtgaggggttcacagagtccctgaagtatatcctcagactctggctgaaggccctgtgtctaaaccatggcctgcagagggcaacagggcagctggagtccacattgagagctgcattcaggaaagctggggacgctgtagaatttgatgagttttttgaaggcacttttcttcagcatcatcatgtcttctggaaacctggaaaar

SEQ ID NO: 95911 - DNA, 66206 bp, Homo sapiens
  misc_feature (1)...(66206): n = A,T,C or G
ctacttaacacaactggactctagtccagtcaagtagttgtcacacccctagtccccattgaactgtgtcttctttagccacttcttagaagcccttttctttcacatactaaggaaggactaagactctagcaaaaacgtgaccttcaagagttaatgaacagactgggtgcagtggctcatccctgtaatcccagcaccttgggaggccgaggcgggcaaatcacctgaggtcaggagtttgagaccagccttgtgaacatatagtgaaactccatctctacttaaaaaatgcaaaacttagtcaagcatggtggtgcacgcctgtagtcccagctacttgggaggctgaggcaggagaatcacttgaacccacagggcggaggttgcagtgagctgagatcacaccactgcactctggcctgcgtgacagagcaaaactccatctcttaaaaaaaaaaaatagttagtgaaccaggttgggtgcagaggctcatgcctataatcctagcattttgggaggctgcagtgggtggatgacttcagcccaagagtaagaggctagcctgggcaatatggcaaaacccatctctagtaaacatttttaaattaggtatggcggtacatgcctgtagtcccagctactctggaggctgaggtgggaggataacctgagcccagaaggtggaagttgcagtgagccgagattgcaccactgcacttagcctgggtgacagaggaagaccctatgtcaaaaaaagaaaaatcctgtgttttgaagaatccaggcctctgtggctcagcaaacgtaggtggctggagagaggacggaccgttacctaaatggtgtggtggcactgacctgtagtcccagtgctcaggagcctaaggtgggaggattacctgagcccaagaagtcaaggctgcagtgagccatgatgttgctactgcctgagtgacaggagtgagaccctgtcttaaaaaaaaaaaaaaaaaaaaaaaacggccaggcacagtggctcacacctgtaatcctggcactttggaaggccgaggcaggcagatcacttgaggtaaggagttcaagactagcctggccaacatggtgaaaccccatctctactaaaatacaaaaatcaaccaggtgtggtggcacacatctgtagtcctggctactccggagattgaggcaagagaatgtcttgaaccccaggaggcagaggttgcagtgagccaagacagacctgctgcactccagcctgggcaacagagtgagactccgtctcaaaaaaaaaaaaaaaaaaagttaatgcacatgagaatctgacctaagaagacttctatgttaatatgctagtctctcctccacacaagagtcaacaggaagtggtattagcttctgattttggtattggtcacctgaccaaatacagtaagtgagaggtgacagcgtgctggcagccctcacagcccttgcttgctcttggcgcctcctctgccttggctcccactttggcggcacttgaggagcccttcagcccgtgctgcactgtgggagcccctgcctgggctggctgaggctggagccggctccctcagcttgcggggaggtgtggagggagaggcgcgggcaggaaccggggctgtacgcggggcttgtgggccagcgagagttccgggtgggcgtgggctcggcaggccccgcactcagaccagcaggcctgccccgctggcccccggcagtgagaggcttagcacctgggccagcagctgctgtgcttgacttctcgctgggccttagctgctgcctccctgtggggcagggttcgggacctgcagcctgccatgcttgagccttcccccacccaaccccaccagccatgggctcctgcacagccagagcctccccgacgagcaccgccccctgctccacgttgccccttcccatcgaccttccaagtgagaggtgacagcatgctggcagccctcacagccctcgctcgctctgggcacctcctctgcctgggctcccactttggcagcacttgaggggcccttcagcccactgctgcactgtgggaaccccttcctgggctggctgaggcctgagcccgctccctcagcttgtggggaggtgtggagggagaggcgtgggcggaaccggggctgcgcatggtgcttgcgggccagcccgagttccrggtgggtgtgggctccgcgggccctgcactcagagcggccggctggccctgccggccccaggcaatgaggggcttagcaccccggccagcggctgcagagggtgtgctgggtcccccagcagtgccggcccaccagtgccggcccaccagtgctgtgctggattttttgccaggccttagctgcctcccggcggggcagggctcaggacctgcagcccgccatgcctgaacctcccccaccctccgtgggctcctgtgtggccggagcctccccgacaagcaccggcccctgctccactgcgcccagtcccatcaaccaccccaagggctgaggagtgccggctcatggcgcgggactggcaggcagcttcacctgtgacccagtgctggatccactgggtgaagccagctgggctcctgactgctggggacttggagaacctttatgtctagctaagggattgtaaatacaccaatcggcacggtgtatctagctcaaggtttgtaaacacgccaatcagcaccctgtgtctagctcagggtttgtgaatgcaccaatggacactctgtatctagctactctagtgggtacttggagaacctttgtgtccacactctgtatctagctaatctagtggggacgtggagaacctttgtgtctagctcagggattgtaaacacaccaatcagcaccctgttaaaacagaccactcagctctctgtaaaatggaccaatcagcaggatgtgggtggggccagataaggaaataaaagcaggctgccccagccagcagtggcaacctgctggggttcccttccatgctgtggaagctttgttctttcgctctttgcaataaatcttgctactgctcactctttgggtctacactgcctttatgagctgtaacactcaccacgaaggtctgcagcttcactcctgaagccaacaagaccacgaacccaccgggaggaacaaacaactccagacgccccaccttaagggctgtaacactcaccgcgaaggtccacagcttcactcctgagccagtgagatcacgaacccaccagaaggaagaaactccaaacacatccgaacatcagaaggaacaaactccggacacgctgcctttaagaactgtaacactcaccgccagggtgtgcagcttcattcttgaagtcagtgagaccaagaacccaccaattccagacacacaaaggctgaggagtgtgggcacacggtgtgggactggcagccagctccacctgtggccacggtgcgggatcgactgggtgaagccagctggcctcctgagtctggtggggacttggagaacctttatgtctagctaagggattataaatacaccaatcggcactcagtatttggctcaaggtttggaaacacaccaatcagcaccctgtgtctagctcagggtttgtgaatgcaccaatggacactctgtatctagctactctggtggggacttggagaacctttatgtctagctaagggattgtaaatacaccaatgggcactctgtatctagctcaaggtttgtaaacacaccaatcagccccccgtgtctagctcagggtttgtgaatgcaccaattgacactctgtatctagctactctggtagggacttgggtaacctttatgtctagctaagggattgtaaatacaccaattggcactctgtgtctagctcaaggtttgtaaaccattcagcaccctggtctagctcagggtttgtgaatgcaccaatcgacactctggatctagctaatctagtggggacatggaaaacttttgtgtcaacactctgtatctagctaatctagtggggacatggcgaacttttgtgtctagctcagggattgtaaacacaccaatcagcaccctgtcaaaacggaccaatcagctctctgtaaaacagaccaatcggctctctgtaaaatggaccaatcagtaggatgtgggtggggccagataaaagaataaaagcaggctgtccgagcccggagtggcaaccacctggggttcttttcacactgtggaaggtttgttctttagctctttgcaataaatcttgctactgctcactctttgggtctacgctgcttttatgagctgtaatgctcactgcaaaggtctgtagctttactcctgagccagcaagaccacaaacccaccagaaggaagaaactctgaacacatctgaacatcagaaggaacaaactctagacacaccgcctttaagaactgtaacactcactgcgagggtccgcggcttcattctggtagctaaacatacacagatcaatggggcagcataggggccaaggcactgcaggggttctcatgactctgagtcaggtgctgtcttgaccgactggttgtgtgattccagaagccttctttcacctgaaaaggcctcactggcctcacctatacagtaagtttgcacatcatctccagggtttctttcatttctacccactgtttttgtttagtaatgatgccttgcagtcctaatgatcttggaatcaagaatggtgactagagaacttcaaagtggaaagagaggctgggcatggtggctcatgcctataatcccagcacttcgggaggccgaggcaggcagatcacttgaagtcaggagttcgagaccagcctggccaacatggtgaaaccctgtctctgctaaaaatacaaaaaaaaaaaaaaaaattagccaggcattgtggtgcatgcctgtaatcccagccactccagaggctgaggcaggagaattgcttgaactcaggaagtggaggttgcggtgagactccgtctcaaaaaaaaaaaaaaaaaaaaaaaaggagagagtaggatggctgagccatgacgcagtagcaatgcttctttttttttttttttttttgagacagagtctcgctgtgtcgcccaggctggagtgcagtggcgcgatcttggctcactgcaagctccacctcccgggttcacaccattctcctgcctcagcctcccaagtagctgggactacaggggcccaccaccacgcccggctaattttttgtgtattcagtagagacggggtttcaccgtgttagccaggaagcaatgcttcctattctagcgccttgctaaactatgtgtgctgcagactgtgttcgtgattccgaatcctaaaaacaaccgtcctaggcttgtctctcagcctagactctagactgatttggctcatttggttgtcttggagacgttctaattctgaagggggcagtggtcccttctagaagatagctggtctgcaaatgcacacctctgcttagtctgaatcctaaagttatagcttgagccaattaaagtggcttctcatttttctctcactctgatctcaaggagccctttttcttctagtaatctagaccttcctcttcctatcacagtctcaaggattgtgcccccaaagcagatgcaaagccctgtctaccccttctccttcccctgaggtagagctttatcgaaggtttctcttggtaaacgttagctttctgaactaagggccgtcttttttttttttcccgcttaagcccattgcataacaatctcttgttttaatcttttgcccaacactgcttttcttactgtcagaggttactacaagtgtttgaacaggtaacttctacctttgaacttctgttgtgacagattcaaaggttccaggggagtgtgttggccactctcaggacagtacacagtagcttcgggtgtgtcccagtcagtcctaggagctgtggaaagagtagaagtgcctgaatgtggtgctgaatcaatacagccagctgtgaggggagcacttcctggacccaggaagggagagtcttcttccaaggtaagctgcaatgatactacctgcactatattgaatatatctgtgagatagtagggaggggattggtgtggggaaagaaagtgggatttgttatgctcaacctaaggctctttaataacatgaaattacatttagttgaatagtaatctcagctgacttgtgtgggaggcaaagaaaaaaatcagttggaaaaggggtggagatatatgagctatccaaatgctagcaggggatggaattggaagggwacactgattttggtaagtgtactaaagcacaccaagccagaatgtgggtctccttcatcttccattaagaaatttctgtctcagtgtagttagaaggatcgtgcgtcagctgctgagggcagagagtcccatttggcagacagagaggaagggaatcagcagatattcgattaggtgctggggactgttctgggtagattatgtatgttacttcattggtgtatctcatcctataaagcaggtggtatccttcccatttcacagaggcatagtgcgtctccaggctgttaaacagcatggcctaagctacatagctccaaggtggtgtggctagaatttgagacttgattggtcagtttccacagcctgcccaataatgcagaattgttgtgggttgccaaagctttcagttaccccctgaaatcctgagggtgtcactcatgtgcacagaggattgataggaatacaactctgatgggcctttagaatgactcaaccttcctgaacttgagcatttttactggaggaggtcaataaaaaaaaaaadaaataaaacctcatcttcccctggccctgagccctttggtgaaggaagacagcacccggtgaagggctcagaggtattagtgtggctgagattcgacacccactctgccatcctctgctctcctctagaggaagttgcctcttggggagctgagttcctgaaactaagcaaatgacaagtgctcctccagcygtgagatgagccagaggatggaatgccacaggccccacttcgtctcccagcccttcatctttcttccatgtccaaaggcggctccccagaggccaagggctcagctcttgtgttctctgagactgtggcacagctcaccctggcttccttagtaggaagcttttaagaactgctctgtagaaagaacaaaccctaatctagctccagcaaagagccaggatcatgctgaacttcctgtgagccttcgtgggggatcgaggctggagaaagtgctgcttcattctgaggtatctgtgaggtggggaaggggcaggaaaatttgtcatttcggcttcctaatctgagaatggtagctccagggcccccctgtagccacagccttaggcggatcaaaaatgagactaatacaggtcctggtaatactgggggtgaccaaggcgaaagaatcgatttttaagttaagttttgaggtgtgactgtatcagagggaaagaaaccatgccaattgaacgactcacagccctgtcgttcctgacttgcttattttcttggctttgccagaacttcttcagagaccaaggcaggcagctctggcgactggagagaggcggggtagaaggtgtttgtgtgggtctgagggctgaggtaccctctagccagactttcctgtcctccgaatccagcagggaacagcgtcacctctgcctctgtgaggcttctgatctgagggggcacctcaagtcattttagtttgtttgttttcatcttagttgaaagatgataggccacaggagggcagggtcaactgtgttgaggcaagctggcttttgtgtcggcccttaggggctgaggtgaaaggctttgacacggagccagggtagctttggcagcttctcccctcctggtcagaacacttccactttcagttgtgaaaaaaaaaattaaaaccaggaagtgaagtccccgagcacgttagaaagcctgacatggcctgactcgggacagctcagagcagggcagaactggggacactctgggccggccttctgcctgcatggacgctctgaagccaccctgtctctggaggaaccacgagcgagggaagaaggacagggactcgtgtggcaggaagaactcagagccgggaagcccccattcactagaagcactgagagatgcggccccctcgcagggtaaggggaccatcgagggggtgttattcagcaagggggtcttgtgagggtgtgacagaggccaagggggcatcctgacccccgactttctttaagcgacttagaatcaagggccggctgagttccacgggcacatcatgctstctccctcctggtctcggtcatgccttcagaccctgtgtcaggaggagcaacgggaaggaaggatgtggggcatgcatggggctcactttccttctctcgactctcttggggaaggtgaaccaaaacagagacctctttttgtgggtctgagcatccagcatagctcccctgaggtgggctgggggtttgccctcaattttatgttgggtaagactgatgaatgagaccaatggggtgggagagacagatgaatggagctgagtgtattttaggaagtaaggccacaggttaagtctcaggtgctgcttaattcctaagtacttccttcccaatgcccactccctgagggtcctaaggtgaatctcaaagaccctcagggagtaagcactggaaagggactctaccactggagaccctcagggaataagcactggaaagggactctaccaccggagaccctcagggaataagcactggaaagggactctaccaccggagaccctcagggaataagcactggaaagggactctaccaccggggcttggtaccttctgagatatcagcctttttttggtggtctgaaaggtagaattgaatctatagctccaatgtgtaggtgattagtattctatatcagaggcagagtcttaaaaaataaagttaaggccgggcgcagtgactcacacctgtaatcccagaactctgggagtctgaggtgggtggatcacctgaagtcaggagttagaaaccagcctggccaacatggcgaaaccccatctctactgaaaatacaaaaattagcttggcgtggtggcgtacgcctgtaatcccagcaactcaggaggcaggacaattgcttgaacctaggaggcggaggttgcagtgagccgagatggcaccactgcactccagtttggatgacagagcaagactctggctcaaaaacaacacacaaacaaacaaataaaaaaacattgaaaactgacttagttttcttttaaaaaaggagtaattggttttgtttatttctcccttcatattctgatatggagtcactctgtggtagtcccctccgattgatcagtattcaaggttaaacacagaacatgtcttgaaagaggcatggtgtaaaattttatagccatcttttgtgtatttggcataataaaaggaacaaaaacctaaataaaacaagaagtgtaagtgcaaatgcttataggacaggcaagtaatatagagaagtaaagtagatggtgtgtaataagatgctaatggtggaaactttagcaaaattcagagcaggcataccccagataaatgcattcaaatttaattattaaaaaagagaaaacactttttaatccagaccaaacagaatatttcagcctagcctgacctaaaatagtctctcccaggctatattgtaattttttgagggcaaagacaccaacaacaacatcagcgtgtcattgcatacctaaccatccacctatagtgagaccacagatactacatggaggctggagatggaggaaggagagagaaatgaatggagagagggaagatgaagccagggaagtaccagtacacagtaggtactcttatatttaatcaagacaatcttcttcttcttgtttttttttttttttttttttttttttttttggaggagcctcactctgtcacctagactcccaggcttgagtgcagtggcaacatcttggctcactgcaacctctgcctccccagttcaagcaattctcctgcctcagcctcctgagtagctgggattacaggcatgcaccaccatgcccaaataatttttgtacttttagtagagacagggtttcaccatattggccaggctggtctcaaactcctgacctcaagttatctgcctgcctaggcctcccaaagtgctgggattacaggtgtgagccactgcacctggcctataggatttgccagcttcttagaaaccaggaatacagtgtctgctcctgtctgtctctcatatgcctcctcagcagatgagcagaccctcagctggagtgcagtcagaggtgactcttgtgcctggcagcatcaagcaagggtgacgtaaccccagcagccatgagtccagccatcactgcttatcacattctgctggaaatgcatctgggtctatttctcccctctatgtctgtacatcctgaggtcggaaagggactctctcaccaacttgtcctccctggcgcagggcctgacacttcctaggttctcaactcattgtttgaataaatacatgagatctggagtttggaaggtcagacagcccrtgcaatgctgtggtcaggccacactattagccttctttggggaagctggtggatctcccagtcttcatgggccattctattctaagagttgtgaggttgcgagtggctcaagttgaggatttgaggtctggggtaaagctaggtcagagacaggccatggttccctacaactagaagtgctctgtttaaatagaaatgagggcttgttggccgggcgcagtggctcatgccagtaatcccaacactttgggaggccgaggcaggcagatcacttgaaatcaggagtttgagaccagcctggccaacatggtgaaaccccatctctgctaaaaatacaaaagytagctgggcgtggtggcagctgcctgtaatcccagctactcgggaggctgaggcaggagaatcgcttgaacccaggaggcggaggttgcagtgagctgagatctcgccactgcactccagcctgggtgacaagagtgaaactccatctcaaaaaaaagaaaaaaaaaaaaaagagatgagggcttgttaaaacctttgcacagaagtggaggggcagtaatcgttcaagaccgtggtcatctcttttcttttgggacatctcgtaatagaacatctgatattggcaaggatgtgaaaactgaggaaaagggaaggaaaggggagctagatttgattgaggacttcccatgtgcctgacagcataccaactgttctacacacagcatctcctttaagtagcgattttcacctgctccttctgtgtacagtggcggggaactgatgctcagtgactctaagtaactgtccccagggctacacatgtagtaagtgaggagctgttgctctggtacctggaagggcacgaccttgaaagtttgcccctggcaatgacaccgttgacaagaaagcttgttgcctgcactttgaaactgttgacccttgaccactggttgggacaggcagtgcaagggctgattctgcagaaaactaaggcaagaagtctgctttcccaacctcttgcctcaccctggcacaggtgacagggtcctagcactttgtccggcctatctttttacagacccccttatcagatccagtggacttctgacactgcttcttcttaccccagttctgtcataatatacttggtcagcagcaggcctgggatgccctttgggggtgttactgacacaagttgtcccggggtcgggatttggactrtgactcacttgaagcccagtggtggatcaaggttgactctatcgacctgagctcctgtgggatttgtcacttctggggtcacatcctgtgggtgactcaactatcctatgctatcttaatggactgacttaagaggctcttggtatttgacttaacatgagatctcctgataaatgctactcagctcaactggccaatgtctggccccacccaggctctctggagtatgtgaaggcaatggctccagaggtgcagtgtctacactgggccccacacaccatctcattcatccttggagactttttcttccccctgccaccccccgccccccaaccttttaactaaagatggaccctccacctccagcagaaatacctcttcaccatttccctcccctaaatgtcccacttgtcccactttagtgcctctagcacatctggccattccccttctccacttccatttggctccatccaacctaatgagatgattggtctctccgtgaagaaagtagatagagagacacagacaacagttgagaaagatggtttggtggcaggcccactggttggaatcatagttgagatcttactagacatcagcttgattggtagaattgtcatccttttttgttttgtttcttaagacagggtcacactcttgtcactctgcacatccaggctcccaggctggagtgcagtggcgggatcatggatcactacaacctcaacctcccaggctcaacaatcctcctacctcattctcctgagtacctgggactacaggcatgcccaactaaattttttatttttgtaaagatggggtcccactatgttgctcaggctggtctcaaactcctggcctcaaacgatcctccagcctcagcctcccaaagtgcagagattacagggatgggccatcatgtctggccagatcatcatccttgcccctggaaagagacaattggcaataaagccagggggtcaaggatcacacatctttgaggttctagtgttccatacagccgtcttaatgtgctccagtctgcactgacctcttcctccttcaaaaccatgagctcactgcacacactgaagcattctgtaagagtttctaggactagatagacccataagtacccagatggcaggaactatatcggccaagtgttcatccctcagcacatggcacagtgctgaacacacaggtccacagtttttgtttactttactgaaaataaacgtataggctgggtacagtggctcacacttgtaatcccagcactttgggaggccaaggcaggtagatcacttgaagtcagagttcgagaccagcctggccaacatggkgaaaccccctctactaaaaatacaaaaattagccggatgtgatgatgcatgcttgttgtaatcccagctactcgggaggctgaggcaggagaatcgcttgagccctggaggcggaggttgcagtgagccaagatcgtaccactgcactccagcctgggtgacagagtgagactgtctcaaaaaaaaaaaaaaaaaaagaggccgggtgcggtggctcacacctgtaatcccagcactttgggaggtcgaggtgggtggatcacgaggtcaggagtttgagaccagactggccaatatggtgaaacctagtctctaccaaaaatacaaaaattagctgggcgtggtggcacgtgcctgtagtcccagctactcaggaggctgagacaaaagaatcgcttgactccgtctcaaaaaaaataaaaagtaaatgtgtaaataagttaaaagtgcagagagtaaatgtatcccttgccacacagacacttctccagcccaccaggtgctgccaaagctgaggtgcatcccatagagcactggtctcaaaagcatcatggctgcctggggaattggctttatcttctactggaccagaagttctgagcatgctttcctgtgctaaacacactgcctggcacacagtaggtgcttgaatacccaaatggatacattatgagggaacccgccctcacttaggtcggactgcttagcgttgcccttctcatggcatgaagcccctggctgtggcattcctgaggaagactccgccgaccctgtcctgctgtgtgcatagaagcatgttctgttccttgtgggaytgaacactgcaaactttccttcagcagactctcctcgctagttgcctttctctcaaattgtgccaatggtgagtaaaaggtgaaggtggcttggtaacagcagcttcccactgtgtctcaggtgccatgctaggtgcagtggaatccacaggtgaggatggtcactatgtgcatgagtgctcacagcactgggaggcctattgacacacagatccatgagtcccaggaagcctcactgggacccaaacccgaggaaagggcttattctgctccacctcttctatctcttctgagctctggctcctgtagcttttcctgtgcaattcagcagcaaagattttaccagtggagctgcatcgaacgccctaatgatttatttatggtatgcttgcctgtggcccaggacacctgtctgaagcctagactcttaaccctttctctgccagctgtcttacacattgggactgttagatgctgtctagcaattgggcttggaagagagatatgagaggttattatcacttatcttttaaaaaattacgtaagcaatcgaattgaatctttccatggtgtggaaactactacttagctaccacctggtgttttaacagggctccctttggtaatgctgtctccctgctctgtccaccacctctcggcggagatgataagaaggaccttccccactgggtgccatggctcatgcctgtaatcccagaactttaggaggctgaggcaggtggatcrcttcagcccaggagttcaagcccaggctgggcaacttagggagaccccatctctacaaaaaacttaaaaacaaaaaacaaaaaacaaaagccgagtgtggttgtgcacacctgtagtctcagatacttgtaaggctgaggtgggaggatcacttaagcctgggaagttaacactgcagtgagctgagcatgttaggatggggctgcgatagcgccactgcattccagcctgagcaacaaagcgagactctgtcccaaaatwaatatataaataaataaaataaggcccttcccatctgcctggggccatggctattataagacaatggcttgagcaactggtgaatggctgggaagttatcagcaggctgtaggtcaggatctcaggccatccttccttcttagctacttggaatgaatattgaaagacacagtttcagggcccctcggccctgtgactcagccttcacctttgctctggtttcttatcggttagagaaatggatgaaaaaggtttccacccacagagctgctgtccagctggattactcagtggctgagaagcattttacacaacatgagggcttggaagaggctgtgtgtcaaatgtagttttggtagcgggagagccacacttgtagaaacaaagctgaggtgtacacttaggtgcattcacatgaaatgccaccaaccaaggtggtagaactttctaaattagctgcctgtgttggaggtgggattatatggagctgttcattttattcttttttttttgtaagtgtgcatatttcagattaaacagtacacatcaagtgttaccttcccactgagactacgctacgcctccctaattaaaactcatccaccaggcgcggtggttcatgcctgtaatcccagcactttgggaggcttgaggcaggtggatcacttgagaccaggagctcaagaccagcctggacaacatggcgaaatcctgtctctactaaaaatacaaaaattagccaggcacacacctgtaatcccagctacttggkaggctgaggcatgagaatcgcttgaacccaggaggcagaggttgcagtgagccgagatcacaccactgcattccagcctgggcaacagagcaagactctgtctcagaaaaaaaaacaaaaaacaaaaatctcatccccctgctgtacccccagttctctttccctactcttgttgtttttgttgttccgtagtcctaagtaacctagttattgctcaggcttgttgtcaaactccccaatataatgcaatctcacgagggcagggttttccctgctatatccccagcacctggaacaatgcaacatatacagccaagcccttcaatagcttttggctgaatgatggagtagacaagactttcaagaaatccagtcatgatttctcctcttccatctgtctttttcttgtttttttgttttgttttgttttgttgttttgtttttgagacagagtcttgctctgttgccctggctggagcgcagtagcacaattacagctcactgcagccttgacctccctggctcaagcgatcctcccacctcaggctcccaggtagtggggactaccggcatgcaccgccaagcgaggctaatttttgtattttttgtagagacaggtcctcaccgtgttccccagactcaaactcctggtctcaaactcctgggctcaagcaatatatccacctcagccttccaaagtactgggattataggtgtgagacactgcacccgacctccatctctctttttctatgaggattgtcttttcagaaacacaaatgcgtatataattcattgtaattgagaagataatgtacacactgtccaaatatttttttctttctccctggcagtacatcatgagctcttttcatatcattacctacagatcgactttcttttttaaaatacctgcccagaattccattgtgtggaagtactgtaatttgtttcattcttctcctatcaaggaaggctttcctaggcttttggattagaaacaattctacagctttaaaggtgataaatataatagttaatacatgaacctgcgtgccagccatggttctaagcactttatatatccattaactcttttaatcatggtgacagccttagaaaggagatgccattactgccattttatagatgagaaaccacagagaattaagttatctgccccaggtcacaaagaaaatgaccaagaagagcttgagcccaactagtctgagccaacattcttaacctgtactttacatgtcatttgtgatgtagtttattgatctgatgtctttctatgagataagctgatggtagaattactaggtgaaagggcatacattttatgatgtgtagagggcaatagggacttctttaagagacagcgtcaaatgtacatttccacaattcacgttgcatttctcaccgtttcatcactggaatctgatgcacgaggaaaaggcatgtcatttaaatctgcattcttaagaactataagcaaagttgaatgtctttccctaattgtaaataacttgcttgttttgctgtgaactttcagcaagctctgcccttgctttattgggttatattttgtttttcattgttgtctgagtttcttattaaagaaattaactcttagcctatctgagggggttgatactttttcctcaacgtgtctttgtctctggtatcttttctgcgggaaaatttttatttttatataatcaaacttgccaacatttctgtttatagattttaggtgttatgtctgtcttgagtcttccccatgccaaattataagagaaaatctctccatactttttcaccccaaccattcttattgttttcattgttttatacttaagtctttgacctatcttcagcttatttttgttgtaggagtaagagagtagacagcttaatgtattctctctgaatggctagccagttgtctcagtacgtttattttaagtgaaaaaatacctattttgatttgaaatgcaatttagtacatgataatagcatctactgggcatgtttcaggatgattttattaaataggtttgtctattcatgaccaatagaaaactcctatagctctttttttttttttttttttttttttttttgaggcagagtctggctctgttgcccatgctggagtgcagtggtgcaatctcggctcactgcgatctccacctcctgggttcaagcaattctcctgcctcagcctccctagtagctgggattataagcgcacgccaccatgccaagctaatttttgtattttgagtagagacagggtttcaccatgttggccaggctggtcttgaactcctgacctcaagtgacccgcccgcctcggccttccaaagtgctgggattacaggcataagccactgtgtctggccagaaaactcctatagctctatagtaagtatttaaatttggtaatgattgctggtctgccacctacccaattcctgctatttttcaaaattgtttcactctttgttaagttttatttttttctggatgtactttagaattagcattttagttcctaagaaagccttcattagggttgcattaaatgtatagatacctttaaggtgacaggaaccttgaatatttcaggtatgtctttccatttttctagcckycttaggtacttcagatctaaacttttaaaatataggttttacgcatttattcttatatacactattgtgaatagcatctttttcatgacttctaaatcagttatttgtataaaatataggaaagctattaactctctgcataccaattttagtaactggccacctccaaattatctcagtaattataaaactgaaacatactagttacctcttatttccttagagggtttttagaatttctcctctcagctctttttttaaattttgttttgttttttaattgggagatatgaccacagatttttatgtcagatctgaatgttgaccccttggattttgaatcattttaaatagcttgggtagctgagaatagcttcccttgggggacaatctactgggctttttccatatgatgcttttctttgactgagttttgtgaagcaagatcattgtctcaaatcacctcatctgtcatatccctagtagaagaaaactacttatgatacagaaaagcaaactagtttaagaaatgattttttaaaagcccttcatcccagggctctgaggaaattgggtgaaggatcttgcaacagaacacacacctggttcacgttcatagcatataaaggaaaaggttatcagctctttccaggtatgctcatgatgctaatggtttgtaatttcatactggccttttgtcattacttttgggtttgtctagaaatactgactctgtagtcaaggactgagagagaggtttcctaggttgagggtggcaggaatgtaggaaaaatgattttagaagctgggttagaaatggaaatcccagctcaaaaagcaaaactttcatatacagcctcgtaaataacacacagttccctttggagtcattataagttgtaaagacttttgacatagtctctaggagagagtaggtaattcctagtatggaagaatgtgttaactaattgggtgtaagaacttgaggatgctggtctcctttttaattagctttctatcaccataggatgagcccatacatgcaaaagaacacagaaatcaattaaatacaaattaatgaaggcagatttttttaaagcttataattgcaatttatgtcttattattgcacaaaaaaataatagttctccaggcctaaaagcaaaggtaacagaatgatttatttgttcctttttttttttttttttttggagacagagtcttgctctgtcacccaggctggagtgcagtggtgtgatctcagctcactgcaacttccgcctcccaggttcaaggaattcttgtgccagagcctcccgagtagctgggattacaggcatgcgccaccaagcccagctaactttttgtatttttggtagagatggggtttcgccatgttggccaggctggtctcgaactcctggcctcaagtgatctgccctccttggcctcccaacgtgctgggattacaggcgtgagtcaccgctcctagtccagtatgatttatttcttggctggactttctacctacttatcccatgtagataacttcattccaactcttctaagcctggaggagtagaaggatcttgaatagtccttaatgtgtgtcagaaatacacccctgtcaccagccaccatccctatccaataccttaccaaagtattgattagggagcaatcctctccagattggcctgaatgacttcttatgatctaagatttgggggtttaagggtggggtctttgtactgcagggaaaatgagttaactgagagtatatggaataaacaattgtgacctggaaaactgttcatttgctcaacaaccacttgttgaaagttttttatgtgccaggcatggtgggggcatcagagacacagcagtaaacaaaattaaaatctctgttccaaagagaacatcagctcagttggcacaatgagtgataaggagctaggactatttcccagtgaacagtgtcatggagaagagaacaaagtccatgacactgactggaaaggtaaagacaatattcaataaggtgatcagaaacagtgagcctccgaggaagtgacatttgaggtgaggcctgacctatcagcaatacacaaccatttcagatctggggaaatgttccaggcaaagagaagagcaaatacagaggcttccagatgggaacagacttcgaatagggtttgagtgggatatatacataggaaaaatacaatcttttaaaagatagagactatcaaaagaaaatgatttttagccaatagggatagtatgaaagattcatagcaataaacatagttgaccaaaaatttaaatattagagtagaaggagccatttaggacatttatccaaagaaaaggagactaaatgaagacatgctgccccaagtccacaaaaggaaaaaaatccgaagctgaatatggggtgatcataacctagacaccaagaatggtccaggaagcatgcacagaggtgtgaaggcagaaggcgtccttcagctaacttgggaataaaacatgttaggagccaggagatgagtgactgtggctccagtcatccatccacaggagaggggaaggccctggagtggatcaaggacaaggatggtggacaaatgggcatcctggggtctgaggccaaggcatgtcaccatcaccacgtcaaaaagtggagtaagccttttgacatgggacatcctggtgtgtactggggcttgttcagctatttgtatattacgtgaaacaggaaatcccagacacagcatgacagagccctctttcctcttttcyttaccactattgtgcttttccctaccgtaaccaggagtgatgttaaaaggaagaggaaatgccagtcacgcccactgcttacaggggattctgtggagtgactaaaccagagctgtagtttgagtcacacaggacgtgtgacaaaaggagggtgacttttttcccccttgtttmtttgaacttacttggaagtgttaacagattctaatggttagaatggtaaacagagcttcctactcctgtcgtggtttgacccakgagtctcaccttctctcaggcccttagtttcttccacttaaacagtgagagagttacatgatrtggttgcaaatcctctcagcgctaatcttgtaaggttaaaaatgtttgagtgtattgggcattaaaaaggagactatacaccaggcacagtggctcacgcctgtaatcccagcactttgggaggctgaggtaggaagatcacttgagcccagcagttcagaaccagcctgggcaacatagtgagacaccatatctaaaataaaattgttaattgtaaaaaaataaaaataaaaaagagattatcaagatagtaaaaagacaacctacagaatggaagaaaatattgcaaatcatatctctgataagtgttgtgtgtatatatatatatgacctaatttttaaatgggcaaaagacttgagtagacatttcttcaaaaaagaaatacaaatggccaagaagcacataaaaaaatgctcaacatccttagtcattagagaaatgcaaatcaaacccacaatgaggtaccatttcacacctactagaatggctatttaaacagacaaagagaaagtagcagtgttagggagaagggaaagaaattggaaccctcttacattgctggttggatataaaatggtgcagctactgtggaaaacactttggtggttccgcaaaaagttaaatataaaattcgcattgactcagcaatttctctcctaggtctacaccctaaagaactggaaaaagatattcaaacaaaaactgtatagaaatgctcgtaatagctttgttcacaatatcaaaagtagaaacaacccagatattcatcaactggtagatagataaatagatagatagatagatagatagatagatagatagatagatagagtgtagtctatccatacaatgggataacattgagccataaaaagaaacgaagtacagacatactaccccatcaatgaatcttaaaaattatactatgtaaaagaagtcagacacaaaaagtcacatatatggtttcatttatatgaaatatttagaatagataaatccatagcaacagaaagcagcctaatcctttctctagaggctgggcattgaagggtttgttaatgggttcagggtttcgtattttatggtgatgaaaatgttttggaactaaatagatgtaatggttgcacaacattgtgaatgtactaaatactgcccgattgtacattttaaagtggttaattctacattatgtaaattgtatctcaatttttttaaaaattgaggaagggccaggtgcaatggctcatgcctgtaatcccagcactttgggaggccaaggcgggcggatcacctgaggtcaggagtttgagaccagcctggccaacatggtgaaaccctcgtctctactaaaaatgcaaagttagttgcgcatggtggcaggcacctgctactcaggaggctgagacaggagaatcgcctgaacctgggaggcagaggttgcaatcagccgagatcataccactgcactccagctgggcagcagagccagactgtgcctcaaaaaaaaaaaaaattgaggaaggaaccatgtgaaattctgtgcacctcctacttgagttggatacctggtcagtggtagcaaactaagcaagctatttccattgacaaatacaaataaatccttccttcattgkcttcctcaaataaaatcccttgccaatataggcaaggtattttcattctcatgaaactgtggctttgaaatgtgtaaatatctcccttgtttgtaatgaagtggtcagtctcgttctgtttgtgggcaatatgattgaagtctgtctcaaaggagtagtcaaacattaacagaccgtgatccaaattaaactatgaaatgtgttcttgtttatcccatgccagactcttaaaaacggttgttagttaaaattgaggtttcaaaaaatgcagtcttctggattatctagggagggggcagaattctgacaatctgtgacccatagtattgttactatatggtaacaatcacctgagattgacagcaggtgcccccttgagacgccatagattctctgtcccttttctcccatatgtattaccagtcaggttattcactcttcttcctgaccccacccccatatcaccacaactgaacagaaattcaacttttagactctgattcaaagacattgtttgcaaagtctcctattaaaatataaatgtgccatctggaagaagagggcagaaatccttagtgcaaccatttttttccatagtcgaacaggagggtgttggtaaggatctcttaatttgtgggtgggattgaggcagagggaaaaagcccagataaaatatcaccagcttggggtggtcgtggtggctcacacctgtaatcccagcacttcgggaggccaaggtgggaggaccacttgagcccaggagtttgaaaccagcctgggcagcatggtgaggctgtgtctttacaaaaaattaaagaattggccaggtacggtggctcacacctgtaatcccagcactttgggaggccaaggtgggaggaccgcttgagcccaggagtttgaaaccagcctgggcagcatggtgaggctgtgtctttacaaaaaattaaagaattggccaggtayggtggctcacacctgtaatcccagcattttgggaggccaaggcaggcggatcacgaggtcaggagatcgagaccatcctggccaacatagtgaaaccccgtctctactaaaaatacaaaaaagtaggccggcatggtggcaggcacctgtagtcccagctacttgggaggctgaggcaggagaatggcgtgaacccgggaggtggagcttgcagtgagtcgagattgtaccactgcactccagcctgggtgacagagcgagattctgtctcaaaaaaaaaaaaaaaaattaaagaattaactgggtgtggtggcacacacctgtagtcccagttattcaggagcctgaggtgggaggttcacttgagcccacgaggttgaggctgcagtgagccagagttgtgccactgcactccagcctgggcaacagagtaagaccgtgtctcaaatatatatatatatatatccagtcttgtcacaatatcccagcctgaagggagtggctggtggcagactggatgggagagcacaaaacaggcacgggcttctcctcccctttggtactgccacctgctttttcaatttcacagtcttccctgaggcagtcctcccttctctgcctgggctttatggctagtttttgaatgcttttgcctcctggagtacctcatcatacaagtccaagtaaggctgaattccaaaaatcccaactctcagaatcctgccaggtggtcacaatagcacccttgtttttatgtaacctagcacccatgggacctggcttttatttttgtttttacttatttttctccccctaaatgcaatatggaaagaaccaaggagttgaggactattatcccagtttctggaagttcagttttctcctctaaaatggaaagggactctccaaaatcaggtaataactaatcgagaggcagaaagatagtaagagtggcccagggtttcttgtgactgttcctgcccccacacaaaattcctgcaccttgtggcctttcttagactagagtgaagtgtgtttccattgttaaagatggttccaggtggcagctaatggcagctgtccaaagctctaagggcaactgtgatcttgatctgatccaacttttaattgagcttgctttgttcttttgattttcagtgggcatgtgtggcctcatctctgagctattgtttcatcaggcattgcagtaaactttgaagaatgcaaattctgaacttcatttgctgtcacctggaaggtgctagacaaattcaatccccttgaattctgtgactagaacctataagaaaaaatgaattgtcgttttgtaggttttcatagagaagtagcaatagggaatgatgggtgaatttggacaagtcactttatcccaaagcgtccatttrctcttctgtgaaatactactttatagtgttgtttggcctaaattaaacaaaccatgcaaaaagcccagccctgtgcctggcatacagtgagtgctcatgtgtttgctgctattatattctcctaatccagtttgaaagctgtgaggcagcaactttccaggaaaagatggcttcagccaagggtatgttcctaggacctaccctaaagttagtctctcctattagagtagtttgaagctgaacttggctgaaaactataagaaaggctggtttaggggaagcctttgttacttttagtttcttgagatctcttcttgacctaactcttcaatgctcaccacgtgtcatccattctccagcactgtttctgtgtacctgactgacagtttgcctcacagtaaaatgattcctctgggctccctaggtgaaaggatgttgggcatagcaagttgtaatgctgttgatctcagaaatccttccgatgctccaaaaaataaagcaatgagcaagacatgtctagccagcaggaaatatccttcatacaaaatggttaatttctaaaacctgtggcatcaccttgacagatctcttctgtttggtttatacgggggaatccaactggaagagtccttcctgacccttggtctgcctgggcagaggaggtactgtcctctgaccatcagattatgttgggtctagcaggctgccttcttccaggctttgtgcaccaacattaaaaaggcagtcatttctcaaaattgtttgggaaatgattaacttgtttcctttgatcctccctgctctgtgtgaggacagtcaagtagcagrggtggagaatgtgttctattattttcaacagtgctaagtaaacactgggggaaattctgccactagagaggtacaactgtgtttgagggtttgaaggcgtgcgcgcgtgtgtgtgtgtatgtgtgtgtgtgtgtccttctgaaaacatagagctattgagtacaaaaatatggccatttcctctaaattttctttcccctgttttttttttaaggtctgaatttcctgctgctgttcacaaagatgctttttatctttaactttttgttttccccacttccgaccccggcgttgatctgcatcctgacatttggagctgccatcttcttgtggctgatcaccagacctcaaccygtcttacctcttcttgacctgaacaatcagtctgtgggaattgaggtaatttaccagtcatccttttagtttgtcaaccttcctcaaactcaaactgtaactccaaacctagggatagctcatgaaggggattgggtgcagcatgggaaagtaaagctttcatgttaccaatcaacaggcaatatacaaatttaaacttctattactggcacattttcttttgtaataaggacagttgtatgatgtcagtaatctagattggagttggcaaacatagccatgaacaaaatccatctttttttgtgcatctggcaagtaaagaatagtttttaccttttttaagggatgagttaaaaacaaaaatgggaaagatgaggcatgtcccacaaagcctaaagtgtttgctgtctagccctttgcagaagtagtttgacaacccatgatctaaataatagtgtcagaactttggggacaggatgacattttcattgagatacccagtgtctgagaacaattaagccatttcctccagttaaattctagtttgagttaaatttatttttcttaacactataaaaattgaattaggctcactcccccgactttcagcaaattccccagcttcctgtatctatgagcaaattgaaagttccaagaatgttctcttcgtttatccttccttctgcgcccatgaatatcttcatctgttttcatcttctaccctcttcagagaaaaaagcattcctgttccttcacaaggctaatttcttctgttgtttttacagtcttctctttccaggatagaaggaatcttactccaagctacctctactctccagctcctctcccacctgtgggtacatctgcatgttcaatgtcttcactgacatcttcccgtcctgctgcattccaccaccacctctcatgcctttcctttcccaccagagttctttgagagtagtttgcttatcgatttcctcttctgaacttcaacccactgagatctgacctyttaccactaccatctcctccaaagtgctctgaatcactcataacctaacttctaaattcagtgacttctctttcagctttcctctcaattgacttgagacttctttcttgaaactcctcctttcgccttttataatatcattccatgagatttcttcctaatttcaaaacaatctttctttgttctttcctctcttcataatagggttttattctcagcatctcttgattcctctgcagcaggggttggcaaacatatgctgtaaaggccaggcagtaaatggcatagaatttgcagaccacatgggctcttttgcaacgactcaatgctgctgttgtagaataagagtacagtaccagacaacatgtaaacaaatgagcatgactgtgttccgataaaagtttacttacaaaggcaggtggtaggccagattcagcctgcagattatagtctaccaaaccctcatctaaattctcacagctaagaaaatacctcctcttttatgacttgaaaatgtgcctaagtctgtgacactgaaatctgattttctattctgacctcagtgatgcttaagtaacttaagctctccatgtcttttcatgcatgttttctcccttcacacacacacacacacacacccctcctttcctattctatttcagttaaatgtatctcttcttacccagttgccaaagttaatagtctgaaacatcttggattcttccttcttccttgactaggcacttaaacagacagcaagaccctgtcttccttcactagacaaggaactttatttttgctattttctgtcttaacgtgatggcccatgtaaattttccctgatgtcctagactaagtcagatctcttgttacatcctcgtgtgttttcctgtacttttatagctctcactttkgatactaatttacattgttgaatgcttatttaattgttgcctgttcttctctacacgaaacttcatgagagttggaccactggaccacacccgcagcacctgttgtagctccagggtccatcccagggccctgatcctgtagatccagctgacatttcagatagattcctagctactccctttttctttttttttttttttttagaggaagtctcgctcttgtcccccaggttggagtgcaaatggtgtgatcttggctcactgcaacctccgcttcccaggttcaagcgattctcctgcctcagcctctcgagtagctgggattacaggtgcctgccaccacacccagctaatttttgtatttttaatagagagagggtttcaccatgttggccaggttggtctcgaactcctgacctcagatgatccacctgccttggcctctcaaagtgctgaaattacaggcgtgagccacagcgcccagccagctaaccccctttttcttgaatacgccgtcctctagctgcccacccaactctgcgctgcgttttcttacctccatgcctttgctcaggctgttcctccactctggaattttcttttttctcctttaccctacccaaatcatatcttttgccaaatgcctacttgtcttcaaagtctgtattgaaataccatttcttctctgtaatctttctgcttaatacagaactggttgcttcatccccaccactaatccatttcctccaaattcattatagcatgtacatcatagtattatatttgcattttttccttatgacctacccatactccaacaaccgtagtgtgtgaggtgcttaagggcagctattttgtcttaactcacatctacagtatgtacagagtacctagaacacatagtatgcattcagtagaagtttaaactcgataagataaaaaagatataaaactatacatatcatctctcctccatatatatacacacatggatgccaggagggttaccaaaaacataacagtggcaatctctgggtgggattacagatccacttttcttttttttttttttttttttttttttttttttttttttttttgagacggagtctcgctctgtcgcccaggctggagtgcagtggcgcaatctcggctcactgcaagctccgcctcccgggttcacgccattctcctgcctcagcctcccaagtagctgggactacaggcgcccgccactacgcccggctaattttttgtatttttagtagagacggggtttcaccgttttagccgggatggtctcgatctcctgacctcgtgatccgcccgcctcggcctcccaaagtgctgggattacaggcgtgagccaccgcgcccggccacagatccacttttcttaagcctttattacacttttgtattttcttttttttttttctgagacggagtctcactccgttgcccaggctggagtgcagtggcgcgatcttgcctcactgcaacctctgcctccccggttcaagccattctcctgtctcaacctcccaagtagctgggactacaggcatctgccgccatgcctggctaatttttgtatttttagtagagacggggtttcatcctgttggtcaggctggtctcgaactcctgacctcaggtgatccacccgcctcagcctcccaaagtgctgggattacaggcgtgagccaccgagcccagccactttcctattttctaaaatgtctacgatgtaaacatactatgatttggggatttttaaaaatcaattgactagcgaagagaacattcccgtgacctcaaaatcggcatttatggtctctttaattcaattcataaaggttttggaaagagtgaggggagacttgaacttggcctaaacttggtcttgtgtcttagggaggagcacggaagggggtttcccagaagaacaatgacctaacaagttgctgcttctcagatgccaagactaygtatgaggttttccaaagaggactcgctgtgtctggtaagcctggtggtctgtccttgcctgaagaagacaaggtgaggtctgtggcccatctctctttctctgtctcacttctaaaaccccagctatttagatgcagtgatccaagtagaatcgcaacatgcaaaatagaggcarcattagaacatagtattaggatgggcgttggaaccagtgtcagamggacttaggtttgaaacctggttcttccatttccagcttcataaccttgtgcagaccactttgcttctctgaatctgtttctcaacacaagaagaacgtccctgccaaaactgttgttaaagggtcaaggagataataatataggacagtatctttaactcactagtacctcatatttgtttagaaacatgcctttcattaatgtaattccctgcatttacagatagacaatctgagccaggactagcagtccaggattcctgatgtcttaccttgtccttaactctgataccatcctactgaccaaagttagcacttctttggacttttttagagactaccaaatgggctttgacacgttcatttggaatacatcaagccttaatatttatatcttatatcattgaacataatgcctggcacacacacgtttacttttaaaagctgctggcttatagctctttctgtgcctttggtcttttgggtgacattctggccrtgtaacttttatccgtcccttgacttctgcatgttaactaagactaagagcatattcatagccaactcctgtcaagtgttaactatacaatagctactgcacatatattacttcatcttccctaaaccatagagagtggttactatcactgccatttttaaagatgaggacccagactcacagcttcaagaccattaccaaggtcatagaactagaaaatgtcagagctgataggaaaatctaagtgtgtctgtttgacttggttgttctattttaggttagctcgtaagtgttttataaaagtagtyactcctccagacaatgaaagatttattgtcaagaaaacatctatctgaagastccgatggggcctgtacttagtatatctggctccaaatcagcatttacttatagacttcatgcaaataacaaataaaaacaaaccaaacatcagtttctttacttctctggcaatttaagatagtatatgtctaatacagtataatttcctttggggttttttccttttttttcagagacgggatcttgctctgtcacccaggctagagtgcagtggtgtgatagaatatagctcactacaactttaaattcttggactcaagcaatcctctcacctcagcttcccaagtagctaggactacaggcatgtgctgccacacctggctaatttttttttcctttttttcttttctttttttttttttttttttttgagatggagtctcgctctgttgcccaggctggagtgcagtggtgcaatcttggctcacggcaacctctgcctcccaggttcaagcaattctctgcctcagcctcccgagtagctgggattacaggcacctgccaccatgcttggctgatttttgtatttttagtagagatggggtttcaccatcttggccaggctggtcctaaactcctgacctggtgatccacccaccttgacctcccaaagtgctgggattacaggtgtgagccaccatgcccggcctacacctggttaatttttttaattttttgtagagacaaggtctcactatgttgtccaagctagtctcaaactgacttcaagagataaccccctccccgactccagcctcccaaagtactgggattacaggagtgggccactatgctcagctctagtgattttctgtttttagaagttttctttattgaggatgtgttgttattgtgactaaaacaagccatttagcaagtgatatgtggcacatgagagatataatttaggatttttttttaaatactaaatcctaaaccaataccgttgaaatagcttctcatggaagcaggcgtgagaaatctggtgtggctacttacatagaaaaatgatagccaggcatggtggtggtgcctgtaatcccagccacttgggaggctgaggcaggagaatcgcttgaacctgggaagtggaggttgcagtgagccgagatcgcgccactgcacttcagcctgggtaacagagggacactccatctcaaaaaaataaaaaaagaaaaatgacacttctggtcctatctggggttgcatacattagccttagctagtagtttgtttatcttgagactcacttggggctactgtttaaaatatatatcttctggttacaccttaggttcactgaattaaatttccagataatgaaacctaaaaatcctcagraagctttgtatttttagcaacacttccaggggattctgtataccagagttggaattctacttagtttagagggacaactttgccaagaatttgttaatggatgggctctttgtagatggccacagcttagaacagaacaggtctgagttgactaagttaatgaaaggctaggctgttgcctggtcaggcatttggctagtaggctgaagctgatcaagtcacagagtttaatgagacctgagttgttgcccctttgggctaattatttgacttattccttagacaccagcctctgctagcatttttatcaatcaagaggtgataagatgcagtataattccttcctggaactctctctctcctttctttctttctttttctttctttctctctctttctttctttctttctttctttctttctttctttctttctttcttycttycttccttcctttctttctttctttttctttctttccttctttctttctttccttttctttctttctttccttctttccttcctcccaccttctctttctttctctctctctctctctctctccttctgtctttctttcttcagggtctggctctgttgcccaggctggagtgcagtggcacgatctaagctcactgcaacctccacctcctgggctcaagccattcttccacctcagtctcccaaatagctgggactacaggctcatgccaccacccatagctaatttttttatattttttatagagatggagttttgccatgttgcccaggctggtcttgaactcttgagctcaagtgatctgccaacctctgcctcccaaactgctgggattacaggcatgagccactgtgcccagcccccagtatactttcttagacattcatcagctctaccacttgctgagtgagcttaaccaagctgtctcagtccttcataattcttagtacaatacaaatgataatagctgggaagatgagttaatgtgcctggcatggagtaagcatttaataaatggtagctatcattagtgattaatgttagtacaaatgatctcaatgttagaccacccaagacacacaccctgggggagcaagtggcttccactctgacaaagccatgcttcagggaaagttagtctgagacgttacttctaaggctttcatgcagctgtttcaattggaagcaaaagtactaatgttttctgtacacagcctcctcattcatttttatatctctttaatcagagtgggtatctcttccctgctttccttccttttttttccatctcttagtctagaagtccacttacttgcctccgaattcctagtaactctctttctgaataattccttttggcaagacctgaattcctcttagcagtttgactagatcctctctatacattttcctgcccttctacttgtctacttataacaacctccttctggcttagacgtgagggcttctaagccacttagtgtgttcttcagcctaataccactacttccttgacttagctttaaaagctgagatgccatttattcttgtaaatggatgttcccaaacttattttaagtaaggctgagtagtttagatattcagaagtttaattcttttattgtcaaatgcaagatgtaaattggaaaaatactgaagacaaatgcatgagtgtgtgcacacctctgtgtgtgtttccgtgtttttttacaagccttgatatcttagaagatactctcatacaaatgggcaaagtacatgaacaaacaagtcatgaaagtaaataaaacctaacaaggaaaaaggtcccactttactagctgttaaagaaacttagactatagtaataacttttcaaacctatcaaacctgaaaatattttcgttttgttttgttttgagactgagttttgctcttgttgcccaggctggagtgcaatggcacgatctcaactcatcgcaacttccacctcccgggtgaagcaattctcctgcctcagcctccccagtagctggaattacaggcatgtgctgctgcacccagctaattttgtatttttagtagagacggggtttctccatgttgggcaggctggtcttgaactcccaacctcaggtgatctgcccgccttggcctcccaaagtgctgggattacaggcatgagccactgcgcccagccttgaagaaagtttttaaagacactatttagcagtctaggagagtgtgttaaaacttgatatgataggagaaaagtgaattgtcacatctgctccagtaagcagtgtggtctaggtatcaaaagcctgactgttctgagcccctattcccttcccttattatattttaggggctctattctaaggaaatggtctaaatttaaaaggatcaatttgaaaatatttagcgtaatttaaagtgtcaagcttgaaaacaatctaaatacccacgatgaaataaagtcaactataatagaacccttcatcgactggccattgaaaccactacagagaagagataatgacatgaaaatacttaggtcagattgggagaggaagcaaggtatcaaagtattatattcattctatacatggggaatgaacataactgtcaaactatgcaaaagggccatgggataatatatcagtgttaataatggtatttgggtgatgagattgatgattcatattttaacttttttatatctttatgagcatagtttttattgtagggaagttcaatccaagattgttcaatacaggctgtttgtgtttacttgtaggctttcacttggtcatgttttgtgggctaaccccatatggatggctttctctgaatgtctacattatcatggaggttacatattcaacactgaaccactcctgttttgtgtagcatttcctaaatgtttcaastatagtttataggactcttcatttttgaggactcagtgctttctgactttgaatttcctggacatataakagaagctcaaatccttgttggacttaccctttgtgtcttgccccttcttaatctccttttagcttccttggtccagagaatttgcaactggagttgattttcttttaatattatgtttttagacaatgggccctgcttgggatatagaaaaccaaaccagccctacagatggctatcttacaaacaggtaagttgagtccatgtttttagacagattctttctaacatagtattctgaactacaggatacgatattggtcagtttttggtcttgacctcttctctctctctctcaccccatctctcttttttgtaggtgtctgatagagcagagtacctgggttcctgtctcttgcataaaggttataaatcatcaccagaccagtttgtcggcatctttgctcagaataggccagaggtaactatgttgaagttaactaaaggaaatgagtcagggttaagtttaaaaacttcaaatgctattccccgtccagcattccaacacttgttaatgccttaccaaagctattgttaaaattttctaatgcttattctacttgaaagagttaccactcagaacctatttaatttctggttaagtgtctggcactctcacctaggtgtttggacttctcttttttctcagcctatcatgtgttttttgaagtcagtctgattgttacatgaggaaaataaggaagctaggagggaccgccaaataagatcttgaagatattgtggaaagtatgtattagtattagaactgaaacttgcaatttgtaattgaactagtaaattcagccattcattgctactgagtctggccatagctatctttccacagtgagttggaagcagattttagacagtaagatgacagaatcaagcttatctccaagttttggttaagtcattaggcacattatccccagaggaagtctttttatgcttcaaacgctccctagaaatgcagcatatgatacatataacatacaaaatctgtgttaactgtctgtgttatcagcaaggcttccagtcgacagaagccattagtagttaagttttgggggagttaagttctatgtggatcttgttgaaagttcacaaactgtaagtcccatttctaatgctaatacaaatataaaaatattcaccaacatttttaggtgaatctgcatactccattcttgtcacagtcagcctcaatagaaaaaggttcccttgactctagtttaggaacttaacacctaatctgatacagttaatccttgaacaacatgggggttaggaccactgcctattcagtaaaaaaatccacagataacccccccaaaacttaactactaatagccttcctttatgataatataggtagttgattaacacatattttgtatgttatatgtattgtatactgctttcttacaatatagtaagctagagaaacaaaaatgtcattaagaaaatgataaggaagagaaaatgtatatactattcattaggtggaagtggatcattataaaggtcttcatctgagtcatctttaccttgagtgggttgaggaggagggagaagagaggttggtcttgctgtctcagacctggcagaggtggaagaggtagaggagatggaaagrgaggcaggaaatataggcaccctcaatgtaacttttattgaaaaaaaaaatccacaagcagacccttacagttcaaacccatgtgttcaaggagcaactgtatattagtctgctagaactgccataatctaatacacagaccatgtggcttaaacaacagaaatttattttctcacagttctggagtctaggawtccaaggtcagagtgtcagcaggtttagcttctcccgaggcctctctccttgacttgtagacagccactttttcattttgtcttcacacggccttttctctgtgcacatgtatccctcatgaccgttcttcttcatagaaggaagggattaggaccccacacttaaaacttcatttaaccttaattacttatttaaaagccctatctcatatactgtcacattggggattagggtttcaacatgaatttgggttgggccggaggaggggtgacagggagacaggattcagtccataacatctacattgatatttaaggcccatcactagcagattcctacctacctttccagttttatttcctgtagtcttcaagcttgctaatgtgtatccacacaatgatgtyatgctgtctgtattagttcgttatcacactgttacgaagaaatacctgagactgggtaatttataaaggaaagaggtttaattgactcacagttctgcagtgctggggaggcctcaagaaacttacaatcatggcggaagggaaagcaaacatgtccttcttcacatggtggcaggaaagaaaagaatgagagcaaagggggtggaaagccccttatgaaatcagatcacatgagaactcactcactgtcacgagaacaatgtattagtctgtttttatgctgctgataaagacatacctaagacctggaagaagaggaggtttaattggacttacagttccacatggctggtgaggcctcagaatyatggtaggaggcaaaaggcacttcttacatcgtggcagcaagagaaaatgaggaagaagcaaaaagtggaaacccctggtaaacccatcagatctcatgggacttatttactatcatgagaatagcacaggaaagaccagcacccatgattgaattacctccccctgggtccctcccacaacacatgggaattctgggagatacaattcaagttgagattttattttatttatttatttatttattttttgtgagacggagtttcactctgttgccaggctggagtacagtggtgccatctcagctcactgcaacctccacctcccgggttcaagcaattcttctgcctcagcctcccgagtagctgggattacaggcacatgccaccacgcccagctaatttttgtatttttagtagagacaggatttcaccatgttggccaggatggtctcaatctcttgacctcrtgatcttcccatctcagcctcccaaagtgctgggattacaggcatgaaccactgcacccggcctcaagttgagatttgaatgggtaygcagctaaaccacgtcaaacagtatgagggtaaccacccccatgattcaattacctcccactgggttcctcccacgacacatggggattatgggaactacaattcaagatgagatctggatggggacacagccaaaccatatcactattctttgttcattcacttccttcttttaatctacctctacctccataaccaaatcctactagtcctctaaagccctgcccagttttcatcagtttcccacaagcagtcccaaatagctttcctcacccttgaaagtgatctctgacaccctaaggctcctaatgccttccatacctcttacggatggaacttatcacactctgcctttgtattctggtctacctttgtattgcagttgtccctgtgcctttcttatctcccttatttaattgtactttatagcagtatttrcaactgtccctatggccccacagtgatttttttttttacataaaagtcaacaaataagtaatcccagcactttgggaggcccaggtaggcagataggttgagcctaggagttttatgccagaatgggaaacatggtgaaatcccgtctctacaaaaaatacaaaaattagcttgacatagtgatgtgtgcctgtagttccagctactcaggaggctgaggtgggaggattgcttgatcctggaaggttgaggctgcagtgagctatgatcacaccactgcactccagcctgggcagcagagtgaggcactgtctcaaaaaaaaaaaaaaaagcaaaacaaaacaagacaaaaaaccagacagcatttgttggctgaatgactgaactggtactcttcagtgtgccctccagtccttacttgaacttctctctgtacagtggatcatctccgaattggcttgttacacgtactctatggtagctgtacctctgtatgacaccttgggaccagaagccatcgtacatattgtcaacaagggtaaaattttgctgttacattacaacttgattctttctcaatgctgagtatttcttcaatttctgcttttttgtttatttgtttgtttgtttaagcaaacttgaaatgctgtggtcggaaaatgttcaagtctttctagttttgtagtacttaggatataattttcaggaaagctacaaaaagcccatgaagcagagatacacacagaaagaagtttcaatgacatgcgtcagggtgacatggtatgatgatatagagacaagactactcactctgaacacactagataaaagcccagagagtgagcttaattgacttaatcacagtaaagctacagatttaatttcctacctttgtaaatccaagtcaatacagttaaccagcatgtaccaatgtccatggtgagtctgcagaaaataattgtcgttgttagagaaacaagtccaaatttgatgggcaagtaacagccctttcacatatccaacatgttaccttctgtcatgggactagtagattaagtgagtaagtccatttgcacagtaaacatcatttgaaactttaaacatgcatcaaagcaaatgctaaaatttagaattgtaaaatacttgtcagctaaaaatcctatttgcccccttctttttcttctattccctactatcctcctcaaataaaacagtgatagaaccacacctcagtaacctgtttaggttatctgaatgacttcttaagcagaaggaattctgtggttcctctagaaactgtaaaatctgctggcacagttcaagaacatgtgcttctgtttcagttaagttcatttatcatcaatggaatgtttcaggttgtacattataaatctgatttgcaggtgtaatctcctttggacacctgttagctttgaaaacttttaaaamctcttccttcttgcaaggcaatcaggtacttagcagagagagggaatgacctctggttctattttggcttccagctgatatcgccrtggtgatctgtgacacaccccaaaaggcattggtgctgatagggaatgtagagaaaggcttcaccccgagcctgaaggtgatcatccttatggacccctttgatgatgacctgaagcaaagaggggagaagagtggaattgagatcttatccctatatgatgctgaggtatggatctgaaatttagcttgcagctccaatgcttgtccaacaccttgggcaacttgcaagataccttcccaagaggacagtgttcttgttctccaggggtggcacrtgaggagtagattagactcatgctgtgaagctctgagaataatttccacaagacaactttgaaactcatgccaggagaggacaaagttctgtggccagctgtatggacttckaagtggataatatataaataggggtttagtaatagttaaaggatgtggctcctggagccaggctgcttgggttcgcatgccagctccacatctgttaggcaaccttgggcaatctcatctcccttctctcggtccgtaaaatggtgataaaaataatcactacctcacagaggtcttgtaaagagttagcttaattcatatatgtagatttctcaggacagtgatggatatgtaataagctctgaaaatgttagctattcatttctttcaaaaaagatttagttagggccctagatgactgaaacttaagagtacaatgggaagtttgaacatgcaatctaccctctataggtagatgattttctagagaaatcttatgctcttccctggggcttccattgttcctgaatgttggcttctggtcctgatccaggttggaattttgcttatattcccatagagatgttctcacgggaaagggagggagagggccacatttatcacagtctgtccatctcaactaatgtctttctttcttggttttccattcacatagaacctaggcaaagagcacttcagaaaacctgtggtaagttttcttctgcctgaatttgagccttgccatagtcaactctcaaagttcatggtggaataagcccttgtgcttcctcctccagcctcctagcccagaagacctgagcgtcatctgcttcaccagtgggaccacaggtctgtgcccatgaaactgaaccttagacccctggtcagccaagaacatggcttcaattcttggccactggtaggctggtaaatactccctctaaagagccctatacttaggggctcacagcctaaggcttctaagtgtgaattcccaaatggaaaaacataaacataagtaaatacactttatttaatatattgggaggtgtttatattcaatagatttcaggggtcttaaagatgatgtcagaaagtcctttcccccgcccccaccaacccaccactctcttgatttgacaccgctggaatggtttcattcaatcaagataactcagtgatagttctccataaagggcttcaacyycaccctacatccacccatctgttagaatgcttaatagtttttaatgtggtccatcatggtctacagttatattctttctagtatgcccagtttataaggtttataaccatatcactatataatattggtagatctggaattccaaacatataaacagcatgagatgtggggcagagggacaaggagggttaacttgaatttttctttgcagctgtgcttctatctgaaatcatggctgtgctctgcatagtagtagaaggccaacgatgcattcagcagtagaatctccgggggcattaattattcctaaacagaggcatataccatccacaaaaagacacagtgacaggaaatgctcttggccttctggaataaaaccaattgaatctagtttctttcaaggccaaaggctacctattagctacataaagtrtctttctctccacctcttatttcctacaggtgaccccaaaggagccatgataacccatcaaaatattgtttcaaatgctgctgcctttctcaaatgtgtggaggtcagtggtcagttgaaaaagaggctctcattaaaatgtgaatctgtcataagatttttatttttgaggttagagcaggcagacacacacacacacatacacacacacacayacacacgttaaaggctggagtgtggacaaacaccagcgtgttctttgtttagaggactgtacattttcaagygttggtcttttaggatcactgcaaatttctacactatatgcagttcaaggcatctcagatctacacagtgtaccgcctatacagctgtctgtggtagtcctgggaggaggtagttttaaaatctccantggaattgaaagttggcattaatctcatgttgcctcctcttacttccctggcctacatagcatgcttatgagcccactcctgatgatgtggccatatcctacctccctctggctcatatgtttgagaggattgtacaggtgagtgttctgtgttcctagcagtatgtggcaagggggtcctgacttgctatcacatgtttattccaaaggcagctacacagtatttactgttctttctccggtgtgagaggtgcaggcaaggagttggctcatgggagccctaatcatggcatggcccctcatttcctgcagagtcttcctctgctaagtctgcatgtgtccagggaggatagtacttgctcctgccttcatgggggtgtgtgagtctagtgacatcacagctaggagcttactatctatctgcccttaattctgagctgacacaagacattgtcttctttttaaattttattttgkttagaatttttgaaaagatctaggattagagaaaaggaagttccctacagaggatcagggaaggagcatttgatctacataaggtgtgagatgtcccccgcgccggtttttgcacacctgagtgtgtaaggtggtgctgtcagcatggtgcataccggaggaggtctgctcttctgtgagtggactccaggcttttcaggctattttgaggctgatttgagaaccaagagccatgtcagcctttcaaaaacgcaggtagtgtggttggaaagttctctctctgctcctcgctacccccaaatgcctcttcaacaagctcatggttgatgcctaaaatgccaaaatgcaagattcagttctttgggctaaagtaatgatatctgattcataaaaaaattgattctaagaaatcttaaaaaatattttaacataatttatgaaattgtgatggtcttacgattgaaggcaggttctgctttaattggcagtgctttcttagtgccacataatgaattgcgtcttacaaaggatgattatcttagactgtcacacagacctgtggtggagtctgggggaccacacagtctcaatatctgtcttatctgtcatgccaccacaacagaaataaatgtccatcctttcttgggggaaggttctcagagtcctgaattgggagggaggtgctgtgcaaraaaagtgtctgtgtgcctcagcccacttcccaaattccttccaagacaggtccccactgaaggggttgtttgcctcagcccacctcctgaattccttccaagacaggtccccactaaaggggttgtttgcctctaagctctataatttggttttgttttcaggctgttgtgtacagctgtggagccagagttggattcttccaaggggatattcggttgctggctgacgacatgaagactttgaagcccacattgtttcccgcggtgcctcgactccttaacaggatctacgataaggtactaactttcagctgaagggactgtctgtgacttgggcctgcacgaaggaactctgtactactatgagatttactccacctctacctccaccctctacaagtatctacgtaaagccgtgtgtaaatacaatccccgccaggtgtggtggctcacttctgtgatctcagcactttgggaggccaaggcaggcagattgcctgaggtcaggagttcgagaccaacctggccaacatggtgaaaccctgtatctactaaaaatacaaaaattagctggactggtggggagcacctgggatctcagctacttgggagactgaggcaggagaattgcttgaacccgggaggcggaggttgcagtgagccaagatcacaccactgcactccagcctgggcaacagagcaagactccatctcaaaaaataaataaaaataaaattaaaaaatgaaaaataaataagtgcaatccccttttccttggataagatgacttggacctgatctgaagaaagcttgactaagagacttggggggcccctcagggttcagcagacatcttgggaagttgttccctttctgaagtgccaggccccatgatatacatttcagatgcatcctctcattgaatcctcacaaaatcatagtaaatcatacttacacctattatttctaacttatgatgaggaaaatgagcctcagaggttaaataacctgcccagagtcacatctaataaggggtagggcagaattaagctttcagtagtcatgtttcagtagtcatgtcggctagtcatgttgatgactagcactgctctatttttcattagaaattacagaatggtgatttctgtaattctgtcttcctcttgcattcattagctgagattcttccataaaacctggtgaatatttgattctttttatttatcaatcttcagaagaatggatttgtgcctcagcaatcttcaaaagtagccaatgagattttctctttgtatttttaggaattcataattttcagatttttttttaatttcagtgattcttttttttttttttttttttgagacagagtcccactctgtcacccaggctggagtgcaatggcacgatctcagctcactgcaacctccgcctcctgggttcaagtgattctcttgcctcagcctcctgagagctgggattataggcgtgcactaccacacccagctaattttttaatattttttagtagagatggggtttcaccatattggccaggctggtctcgaactcctgacctcaagtgatcaccctacctcagcctcccaaattgttagtctttcttcttgatcttctaactgccccatcgtggcagttgggaamcctcatcaagttgctcatgtgtccttttgacaatacccctgtagcctctgatagcttccttggtttctggcacaagatgtctcaacctcatcttgtatatttctcacccaattcttagagtgtctgattgcttcagggagccgttgaagctatttgaacccaggcaatatagtatgtgatgattcctcgggctgggatccgtgaggaagtaatgcatggccattcttcacatgctttggaaccctcccccacctccccaaccacctccaagattttaactcttcctttcactcttaggactctcagcagatgctaaatgggctctggtgacagggcaggcagtgttctagcagaactgataacaattccagcagtttcttaccatgctacgcaattagtagatttggtggttgttatggtttttgttcatatgttgttgttgttgtacattttttatttttcagagatagttattgtataatataatacctaatacacagttcacttctggaatgtatttttkttttgttttgtttttgtttttgagacggagtctcgctctgtcgcccaggctggagtgcagtggcacgatctcggctcactgcaagctccacctcccgggttcgtgccattctcctgcctcagcctcctgagtagctgggactacaggtgcccaccaccacgaccggctaattttttgtatttttagtagagacgggttttcaccgtgttagccaggatggtctcgatctccctggaatgtatttttaaaatgaaggactttattagcacacgtctctaatactagctctttgtcagtgacttgttgagggagggtgagtcttgtgaatgttgaagaaagataaatctcttttagttgagggagattctaagaatggcatgatgcaggaagcatttgagcatggatcttggagacagattatgacatactggtacaatgataatgttataggcataagaagatgcttatgtcctagagcacaatttacattagaagatgaaaattatcacccctgcttggctggaggcccaaaaatggggttataaacatggaagatggatggagagggattcttcaaattttgaacaagaaaaaagacttcaattgccttgaatctgacttccagtagggtggaatcttgaaagccagataagagttcaggactaaattttggaaataaggggtcactttgagctgtacttggggaagctctcctttggcaggagtgtggttgatggaatgtagggtcacagtgaggtcagagtcagggagaccagggaaatcatgcgagctggaaaaatggtgtcagaattaagcccaaagggaagaaatcattttagtaggaaggtaggaaactctgttggggtttgtatggtgtggctaaagacaccttgtttatagggaagggtgggaattctccaagttcagttatataagcattacagagggagagggaggaagacatgatacttgttttaaaaaatcagattcctgggccgggcgtggtggctcacgcctgtaatcccagcactttgggaggccaaggcgggcagatcacgaggtcaggagattgagaccatcctggctaacatggtgaaaccctgtctctactaaaaatacaaaaagctagctgggcgtggtggcgggtgcctgtagtcccagctactcaggaggctgaggcaggagaatggcgtgaacctgggaggtggagcttgcagtgagccgagatggcgccactgcactccagcctgggcgacagagcgagactctgtctcaaaaaaaaaaaaaaaaaaaaaaaaatcagattcgtaggctgccctttgacctactaaatcaaaagccctagaagtggtgcccattgagctgtgttttttgtttgtttgtttgttttaaatctagtaccccccaggtgactttttaggcagtccctctttatctcagttgtcaagttgtttcccaaggactaaaaattggggcaggaagtgggaggactggagctctgcattaagttcacttctttctgagcatggccataattctctgggctcatcattattcagcaatccaattcatgactgtgagactgtgagaccacttccttataaagctagaacacactgtttcttgctcactaatggctttgatgagtatctccaataggtttccaactaaaaggagctatcactctgcaggtacaaaatgaggccaagacacccttgaagaagttcttgttgaagctggctgtttccagtaaattcaaagagcttcaaaagggtatcatcaggcatgatagtttctgggacaagctcatctttgcaaagatccaggtaggttgggcaggtcctggactgaagcaggcaaatacctgggctgccttctgactccttagaccttgcttttcctctgctgcttgagcgtcactttaactagagatcctttcagactttgtgtccactgccttttgagatctttcttgtaccactttactactaaagggagtaggtttaaaaaaaaaaaaaaaagcaggctgagtgtggtggctcacacctgtaatcccagcactttgggaggcctaggtgggtagatcacctgaggtcaggcattcaagaccagcctgaccaacatggtgaaacccagtctctactaaaaatacaaaaattagccgggcgtggtggtgggtgcctgtaatcccagctacatgggaggctgaggcaggataatcgcttgaacccaggaggtggaggttgcagtgaactgagatagcaccactgcactccagcctgggcagtagggccagactctatctcaaaaaaaaaaaaaaaagttttatttaggttctagcactctctcttattttctttggtggtctgttgagattataagcaatttgaggggctgaagaatacaaattatttgagaaatatatggcttctggtcccagctatggatagtgatgacaataatagctaacattttaagtgcttttctacaatccagactgtattctaagtgctttgtaaattaacgtgagaattgatgtcagtttaattctcataacaacgctgcacaggctattatacccactctacagtggaggaaattgaagccaagagaataggttttagtatgtcttttgtttccactgaacaggacagcctgggcrgaagggttcgtgtaattgtcactggagctgcccccatgtccacttcagtcatgacattcttccgggcagcaatgggatgtcaggtaagccaagcaccttctttgagaataggctattttacttttgcacaaacaggctcactgtttaaataaaaatgaaaacaactaaaaggtaccaaaatgaaagtcacctaaattctcaaaatccaaagaaaatatccttctaaccatctcttcaggcatctgtgtgtagaaaccttcacataaataaaaccagtgctctaaaacacttgttaatgttgctccttgtcaaataaagctcagcatcattttaatgatttcacagtagtttactgaatgtagttgacccttgaacaatgcaagagttaggattgcctacccccatggcagtcaaaaattcatgtataatacttgactccctagccgggcatggtggctcatgcctgtaatcccagcactttgggaggctgagacgggcggatcacgaggtcaggagatagagaccatcctggctaacaaggtgaaaccctgtctctactaaaaatacaaaaaaattagctgggcgtggtggtgggcgcctgtagtcccagctactcgggaggctgaggcgggagaatggcgtgaacccggsaggtggagcttgcagtgagctgagattgcgccactgcactccagcctgggcaacagagcaagactccatctcaaaaaaataaaaataaaaaaaatacttgactccccaaaaacttaactactagtagactactattgactagaagccttaccaataatgtaattaatcaacacatattttgtatatgtattatatactgtattcttacaataaagtaagctagaaaaaagaaaatgttatttaagaaatcataaggaagagaaaacatatttactattcattaagtggaaatggatcatcataaaggtcttcatcctcactgtcttcatgttgagtaggctgaggaggaagaagaggaggggttggttttgctatctcaggggcagcacagacagaagaaaatccacctatcagtggagctgtgccatacaaacttgtgttgtgcaagggtcaaccgtacccaaataactaatctcctattaatggacacttgagttgcttatgatatttttcattgttataatcaattaataatctagaataaatccacgcaagaagggattattgggtcaaagtaatacacacaatgtatctgtgtgtgtgtgtgtgtgtgtgtgtgtgtaataatgtatattatcaaactttcttccagaaagatcttttttgcacatttctgcaagtatacaaggccttatttgcccatgctcttgccagtgacagactttatcagtcattcagatattagctaatcagataaatgaaaaatcttattacagttttgtttcttttatttacaccaaacatctttctattgcttattgacatgtatattttatccatgaattattctattacttccttatagaaaaacaggcaaaagataatttggtccttttttatatttctaagagttcttcacagagtaatacaggttgagtatctccctatttgaaatgcttgggactaaaagtgttttgaattttgcatttttttccaattttgtaatgtttgcattrtaaaacagttgagcattctgaatctgaaaatccaaaatctgaaatgctccaaaaagcatttccttggaacatyatgttggcactcaaaaagttttggattttggaacattttggatttcaaacatttggattagaatagtcaacctgtaatattaacttttgtcatgttggaaacatttttcctggtctcatcatttttgccctgtgtattgccatataaaaatttccaatgtttttatagtcaaactaaataatcttttctatttgtaggttttaaactgcttagacaggacttcctaacccccaatatttcataagactgtttcacccttattttctggcaaacttaccattttccattttttccttttaagtctcagttccacctgaaatttgtccaagtgcttggccatgcatattgtctcaattttcacccagatggataattagttcattcattcaaccaaccatgcagagcatgaacaaaacaggcatagacttttcctcatgagtcccctatctgtataaccacaatcaaaagagactccagaatgatgccaaggcctgaggtccttcaaattagcatcctcttagccatttttaatactgtcctttccttaagcccctaaaaccaatagatcagcaggtcctgttgctaactccttcccgaaatgtcttctctaagccttcctctctctcccaactctgcctatcacaggccacaccccccattgcagcagcccttgaacttgtttcctgcccccagcctctctccagtcaagattatcttctataccaaggattggcaaattgtagcactggctaaaactagtctgcagctggtttttattttaaaaatattattcaaatacagctatgtccatccatttatatatggactgtggctgcttttgtgctattttggcagagtcaagttttgagtcagataccagatggctcacaaagtggaaaatatttactatcttggcctgtacagataaagtttgcccacccttgttttatatcatagtgggggctatttcccttaaaaaatactactccccttcttcagttccttcagtgatgctccattgctcagggtcaagttcaattgctattgggttgcacaccacttagtgaataacttacatgttcccacctacttgaaatgctgcattttcttttcttttttttcttttttttttcttttgagatgtagtctcgctcactgtgtcacccaggctggagtgcaatggcacaatctcggcttactgcaacctccgcctcctgggttcaagcaattctcctgccttagcctcctgagtggctggaattacaggcatgtgccaccaggcccggctaatttttgtatttttagtagagatggggtttcaccatgttggtcaggctggtctcgaactcatgacctcaggtgatcctcccgccttggcttcccaaagtgctgggattacaagcatgagccaccatgcctggccaaaatgctgcattttcatataaagttctatgctttggtctatttccagacccttttggtttctgaatggccagaaggcttggtagtaaatactttgcagcttgggtatgagttcaaggttttttgtttgttcgtttgtttgtttgtttgttttttgagacggagtctcgctctgtcacccaggctggagtacaatggcgtgatttcagctcactgcaacctctgcctcccaggttcaagagattctcccacctcagcctctcaagtagctgggattacagacacctgccatcatgcccagctaattttttttgtrtttttgtagagatggggtttcaccatgttggccaggctggtctcaaactcctgatctcaggtgatcctcccgcctcggcctcccaaagtgctgggattacaggcatgagccacygccccctccaagttcaaggttttaagacactaagtggtctcgaacccttagagaccttgctttcctcgtgtcttgaccatagcaygtggccagctcacactttatcttgagtaagtctaaaagctcttctttggtttcccaggtgtatgaagcttrtggtcaaacagaatgcacaggtggctgtacatttacattacctggggactggacatcaggtaagtcctccatctgctgggcaggaggtgccatggttgggagaaaggttctaactgaactaggactttggagtttagataacttcagttctctggactaatgtggcaaatgcaaaattcaagttttgggtccaggcctgcctatcttggctagtctgcattggtgccaggtgatttttcagtcttcctcttctagagtcaattcataaatatcttagaaatgtgcctggaattatcaccatgcaagagtttctcagctrattcagcacggtatgttctaggtcacgttggggtgcccctggcttgcaattacgtgaagctggaagatgtggctgacatgaactactttrcagtgaataatgaaggagaggtgggtaggtcatgccctgtsgtcagacagtcatggtggggaggtttatatcagaaagagcaaataattgtaagcaaacttggatttggcccctttgagattgttagcaaagaattaagcattctgaacttcactttcctatcscctatagtggagacttagatctggtgctcttcacagtgtagtggaagccatcaaatgatttaaggggagcaggtgtttcataaactgcccacgctgggaggagcagcctttgctattgtcaccgccttgtatgtctgctgtgcaggtctgcatcaagggtacaaacgtgttcaaaggatacctgaaggaccctgagaagacacaggaagccctggacagtgatggctggcttcacacaggagacattggtcgctggctcccggtaggtatatcatcagaactcctggaagtctatgcyaatggactgagaagaacaatctgcttatagcaagaggtgcagaaatgcaagtaggttaatcagctgaggcagctggaggggattaggtttgtaccctacctggcttatgacttcctcatactatccagagaagaacatacagactgaggtggtggatcacctgaggtcaggagttcaagaccagcctggccaacatggtgaaactccgtctctactaaaaatacaaaaattagctgggcatggtaacgggcacctgtaatcccacctacttgggaggctgaggcaggagaatcgcttgaacccaggagatagaggttgcagtgagccaagattgtgccactgcactccagcctgggtgacagagactctgtctcaaaaaaaaaaaaaaaagaacatacaattgaaagaatctaggttaagttaaaaaaaggctgggcatggtggctcacacctgtaatcccagcactttgggaggccgaggcgggcggatcacaaggtcaggagatcgagaccatcctggctaacacggtgaaaccccgtctctactaaaaatacaaaaaattagctgggcgtggtggtgggcgcctgtagttccagctactcgggaggctgaggcaggagaatggcttgaacccaggaggcggagcttgcagtgagccaagatcacaccactgcactccagcctgggggacagagcgagtctctgtctcaaaaaaaaaaaaaaaaaaaaaaaaaaaaawatatatatatatatatatatatatataggctggaagtcatgagatttgtgttctggttgcagctcttccatggatcaacaatataaaattctgagaaagtaatttaacgtgtgaataggagctgccaaagctagaaagtctttcttaaaaaaaaatttttatagagatggggtctcgctgagttgaccaggatagactcaaactcctggcctcaagcaatcctcttgccttgacctcccaaagttctgggattgctggtataagctaccacaccagaagtactgccagagtacttttggtattttgatcacactgttacagaagacaccaagatgtagaccagttgaagtgttttcttcttgccttattccttatcgaatatacaaccagcaagcagtaagtcagtgatcctagcactgtttttagacccaaactgaaggtgggattctttaacaggtcaggtagacctgcacatcagagttggcatgggtcccctgcaatggaataaatttgctaccagccagggaaaaattaggtgacttctctaggaaaggggaagggagatgtactactctgtcctttttttttcccccttaacttttcttgaggcagaagttgtggtttgaagccaagtgtggcagctcacgcctataatcctaacactttaggagactgaggagggagaattgtttgaggccaggagtttgagaccagcctgagcaacatagcaagactctgtgtctaccaaaacaaaacaaaacaaaaacccaaaaaactttggtttgataatgccgttggtccacagcttttgcctcttatgagtttcttgggataaatatcctccctattaattcacaggcatatcaaaacaaggaagaaggatttctaaatcaagtgtttgcagaggctagtgtttgtctctcattgaccttcacagcccctttctgtggaagatacagagacatatttttagcatagcttgataattagcagtagttgctattagttttcctaagaagaaaggaaattattgcaagggcagtgatgggatttcccaaaagatcttccctctcaaaagttttgtcttaactatgtgctggggaagtgggaatgtcactagaacttaaaactcctttcttgctcaatcaatatttaagatttaagtgagatttaaggaatgcttgacaatgtaacttttaagaacactggtcctaacgatgcattttattgatttgggtttggtagtatcttgctaatatatttgtttctgtctagtaacagaattaaataacactctaataagcctaggatgtaagcaacagatatgtccccacaccagggttatagaaggctgcaccttattaatcactttcagataatgaacgttaggctgaattgatggctaatttatcaagtcggccttgtgatagttccagtgttggtttagttagtcgccctacttagggtgttagcatgtggattttatttgccatttgtcccaattctacaattcaaatccctaaagacctaagctcctcagaccaattagttcagagaaatgaagctgcaaatgacctttggtggctggtcagagtcctctcagccctgttgctgtcctaacaagcccagtaattgagttgcttgattagcacagtggagctgtttgagcctgctcccggatctaacaaggaggaaaacataacagggagtcaagtggtgggagaactattcaaatcaaatcaaaagtctaaacaaaagacaacacctctatttctgagagttctgaaaatgaactaattggaaattagtgattggaaattgagagctgtgcaatttcttccttggatgaggcatcaatttgcataactccagtagatccaggagactttctctaaggctgcgcattgactctccacatagatatacagtaaagacaggttcttgctgcacgatgcttccctcccctttcaccaaagccaagaaagagaaatgaaagacagctcaaaagtctctggagaaatcagctttagagaagaaagatgactgtgacttcaccactctccccactgatatcatctctgtggctcaaaaatactgatacttttatctgtctcatgtagaatggaactctgaagatcatcgaccgtaaaaagaacattttcaagctggcccaaggagaatacattgcaccagagaagatagaaaatatctacaacaggagtcaaccagtgttacaaatttttgtacacggggagagcttacgggtaatatatcattttaacaatagcccatttcagtcacaaaccatgctggttcttgtagctacaggaaatttgtatagttgggttcagaatgagaagatccaagcttataaaactaaaaaaaaaaaaaaaaatgaagttacattccaaacctcaaataaggcaatttcaatttaaaaaatttcaaaactatgatggacgttgtacacaagtcagtagaattgtttagaatggctatactaaaaggtaatgattcagtaaaaaatgagctccacattgcacttagttcccattccttaaggagttccttaaagctatgtttaagagcagtatgtataaaacaacaaactgttgcaatatatataaagcaacaaacaaaagtttgatcaacaaactgttgttttatacatactatgcttaaacgtagctttaaggaactccttatcccaaaacaacgaactgttttatacacactgtgcttaaatgtagcttttaggggacaaggggagagttgacatggacaagccagaggcgctttaagcttaatgttgaaggatcagatttgaatggaacatctttgtaatgagatattgagtgggaaaatgggattacagttccatggtgttgaaaatatatggtgagaaaagaacactagtactggatttaaggttttggggaaataactattacaatgacataattctgctttatttaactactgggggacatccctacataacttctctcatgcccttgcaccttttatttcctttccatagtcatccttagtaggagtggtggttcctgacacagatgtacttccctcatttgcagccaagcttggggtgaagggctcctttgaggaactgtgccaaaaccaagtaagtcttgcctaggaaagctttatgcacacccatgggyccatcgtggaggagaggatgmctcaccagttcctgcatctgtcacaagtggctgcagcccaaacagrctgaatagttttatgggactcggggataggatggagagtttaaaaaataaaactctcttttctatttaaaataatatgttcattgtgggaaaagattgggaaagaagagtaaaaatgctattcagagaaaactgttaacacttagatgtgccttttcttctcagtttttctttcaatattgggcatataatgtgcttgtgcatagttttatattcctgctttcatactgcatggctttgacaggcactttgagttggttcatgcttagcccttcaggctttttgaaacagccatgctttaagtgatgttttgtattcttaggttgtaagggaagccattttagaagacttgcagaaaattgggaaagaaagtggccttaaaacttttgaacaggtgtgtnctaccactgatgttatactggcctcttgtcagaaagttttgtttaaagtttccatctaatgaggtttaaatgtataatttctaaggaattgattttagattttgtgccattaactacaaaatgaccttttgtagttacttgtacagcgccctttttttgctgtttattgtccattctcccttctccctactcattactttcttaaattatgtttgtgggaatgggcatgtgttactgttacctttaccctttcactgcatcaacctcactttyttcacagagcactcagggggctctgcagagaagtccaaatcactaatgagcatggatgtgtgtgtgttcatcttccaggtcaaagccatttttcttcatccagagccattttccattgaaaatgggctcttgacaccaacattgaaagcaaagcgaggagagctttccaaatactttcggacccaaattgacagcctgtatgagcacatccaggattaggataaggtacttaagtacctgccggcccactgtgcactgcttgtgagaaaatggattaaaaactattcttacatttgttttgcctttcctcctatttttttttaacctgttaaactctaaagccatagcttttgttttatattgagacatataatgtgtaaacttagttcccaaataaatcaatcctgtctttcccatcttcgatgttgctaatattaaggcttcagggctacttttatcaacatgcctgtcttcaagatcccagtttatgttctgtgtccttcctcatgatttccaaccttaatactattagtaaccacaagttcaagggtcaaagggaccctctgtgccttcttctttgttttgtgataaacataacttgccaacagtctctatgcttatttacatcttctactgttcaaactaagagatttttaaattctgaaaaactgcttacaattcatgttttctagccactccacaaaccactaaaattttagttttagcctatcactcatgtcaatcatatctatgagacaaatgtctccgatgctcttctgcgtaaattaaattgtgtactgaagggaaaagtttgatcataccaaacatttcctaaactctctagttagatatctgacttgggagtattaaaaattgggtctatgacataytgtccaaaaggaatgctgttcttaaagcattatttacagtaggaactggggagtaaatctgttccctacagtttgctgctgagctggaagctgtgggggaaggagttgacaggtgggcccagtgaacttttccagtaaatgaagcaagcactgaataaaaacctcctgaactgggaacaaagatctacaggcaagcaagatgcccacacaacaggcttattttctgtgaaggaaccaactgatctcccccacccttggattagagttcctgctctaccttacccacagataacacatgytgtttctacttgtaaatgtaaagtctttaaaataaactattacagatacttacgttgtggtgtttctttcctcatggaccatgatgaaaatcagtcttaaacaaggaccccttaaaaatcaagtacagtatctgttcttaaacttgggtacacaatagaattatctaggaagtttaaaaagacactaatgcccagcactttgggaggccgaggcggacggatcatgaggtcaggagaccgagaacatcctggctactatggtgaaaccccatctctactaaaaatacaaaaaactagctgggcgtggtggcgggcacctgtagtcccagctactcagaagattgaggcaggagaatggcatgaacccgagaggcggagcttgcagcgagccgagatcgcaccactgcattccagcctgggtgaaagtgtgagactctgtctcaaaaaaaaaaacaaaaacaaaacaaaaaaaccactaatgcctggttgccactccagggattctggcttaaatggccggatacagcctgggcactgagattgttaagaagacccacagatgattctagtctgcgaacaggttagtgaagaaaagtaagttctgaagaccaaaccttcttatcccatagctgtaaagaataaaacaaataccagctgagccaaaactccaactgagcacaagtcatatccattcttttaccatctttgttgtactctaattataatcttgaatattaatagtattcttttctggcctccaactggagttaaagagaatgttcttggatggtctttctagattttgagcccagaaaagccaaagaaatatctattcttaaggatctgaaacaaaagggtaggcaggaattaacttttaaagtctagctcccattatcactttaactttctcgccttcacttcctttcctattctcccctcacgcattacagctgaacctcactagttaccttcctgtttctcaaacgtgtcagacacaggtccagcctgtttttgttcttgctgctgtctctaaaatgcaaatatcccaaagcacatgacttgtcccctcatctgcttcaaatgccaactcaagactgtcctaccttcttgcttcacaataacatgactccatcttacatatattttacctgtctgttcactgctgaattcccaagtgctcttcccttatcctcaactattacaggcctggcccccaaagcttcacattccctgccttggaaaggtttctgaagtccagagaaataggctttctctttccttctgtgattccactgttatgtttagacaagcccaatttaagcatccaagcccaccagcttggatcctaccactcacacaagcttcagctttttactcaagggtacatgagtagtttgatatcactatgtttaaagtctagaacactactgccacgggatccttggggtgttgcttccccagctggaatcctctgtggctggcagcccaaagtccagagggggcctaggcggcagggcgctggtgtcagcaccactcagagctcacgtacacctggccaggtcctcacagcacccgggcttggcctcacctttgctccagagcgagtgccaggagcaggaagaggccaagcagttgttggggggggggtgtggggggggtatttcccctcggccccctagagcacaaggatgcccgggtccgcagccacggctggacagctgtagctacgcttggctcctgcctatcacggctccccctcaacacccctcaggccaccactgccatccgctgccatcactatgaccgcaatatcccattaatagggttaatatcttgaagcaagtgtgtcatgtcttaagccacgttttaagatgccagttgtccacagggcagcagagcagtttttccataaggaactaagatgaacctttttagtcagcaaaaagaaaaatgctttaagtaaaaactgattatacccaacatccattgatctttatttgatttgacaaaatctgcatttttaaaagacaggtaacaaaatctgaggttatactgaatctgacaaattgagttctatagtatctagaatatcatataagaaatatcaactgagggaaaagagaagtaccacatgcagatgctcctggcaaggggggaactgtatctgcaggtgaggtccagagtgtgcagtgcataagaaaatcctacagaaaatgccgttaacttacttggatgaaatgtttttcctttgagggggaggaagaggtggtaaagaggggcaggaattcaaaggcatatgcagaatggcttctccatttcaaaatggtaataaaaatatttaaatcatggcactagggcacctttgaggaaaagaacatcttaaccagagtaggctcattgcataattctttagtaatatgtacaattttcaagtaattaagcagacttaaaggataattttgttttaacagcagctatctatttttcttctccccctctggggcttgatctgtttcagcatcacagggacacttttccacacattttctagggaaccaaccccttattcttgaaacacctgagggagaaaatgaaattgaggtgaaatagtctgatggatgacagtgacattactgaaagcagtaagtcctattacttcaaattaataagcttgtagttagacttttattccccactttgctatctattataagcacagtttgaaggggaaaaaaataagatttttaaatgttcataacaagctaggaacaggtatttcccaaatttgatgatcccgaatagggactaatgtggttaaagacagctcctaactagagtcagggggaactcggtatgggtgtttacttatatgtgtatgatcaggaaaggtgtttttggcacaccatcacactgtcttttccagggaactatcttcttgtagtctttgtaaatttcctttttagactttttctaacatatatatttctttcttttttttttttgagatggagtcttgctctgtcacctaggctgtagtgcagtggcacgatctcagattactgcaacctctgcctcccgggttcaagcaattctcctgcctcagcctctggagcagctgggattacaggcacacaccaccatgcccggctaatttttgtatttttagtagagatagggtttcaccatgttggccaggctgatcttgaactcctgacctcaggtgatccatctgccttggtctcccaaagtcctgggattacaggcatgagtcaccacacctggcctaacatatacatttctatatcacggccgtcataagaggttaatttatgattaaccccaactattttttaaagaacatcccgagctaatctttactttaaaaagaaacaattataaaacttaagaaaaaaaaaaacacaaagtttcaatctactggtttttataacaacttaagagaaatgctcaaagtgggggcagcaaatagtacaggggtttggtgcatagaatctggagtcagactgcttggggttaagccctagctccatctgttttcagtgcatagctatgggcaagttgcctctctgtgcttcagttccctcaatcaaatataaataatagtgcctacctccgaagtattttggggacttctacaccttaagggtagcacttatacaagtacttttcgcatagttatgagctcaaatgttagctatcattaaaaagacctgaaaaatacaagagctatagagaaatatataaggaagttccttttgttgcttagtgatatacccttctatgcagttcccctaatgcattaggcatgattggtttataaaagttattcttgtaaaatttggaattattgctaatagtcttgtcctttaaacatgcccttccatttccataccttctataaaggaatcatcaagaattttgtctccatataaccagtatctgaaatatttaaaagatgaaaattaattttttaggctagatattaattttgtccttgaagaagaaatgcagtacttcctattacttaccgtaaacctcttgtggctaaaatgaattcccctttttgcagctgtattcgaggctcttcggtgcagggacttgtgaagaaggttttgattcctttattcagagggcagcaggcaccactataatcttctattactttatagcgaacctgtcrtcagtgatcagaagaaacctttaaatattcacccatgatatctgagttttaagtctgaatttcaaattttaaagcaagatccaaaatatccagtgacaagccttctagttccccttctaggggaacctcccagttccccatccacctagttccctgggaggcaactaatgtttctagttctcaaggcttttcttactcctcttttcaagcccatagctaagaattagagttagagcagggctaagaacattctgccatgatggaaatgttctgtatgtgtagtatccaatgcagcagcacttgacacatgtagctactgagtgagcacttacaatgtagtgaatgcaaacaagaaactgaatttttaaattgatttaattttaacaaatttaaataaaacagccacatgtggctggtggccatcatatccaacaacatagttgtaaggataggtttcacattaaggagctgtattgaggataattattttcctatgttggcaatataaatggactaaattcctcccaacctctagtcccaattatttaaataaaaacaaaagttaactgcatcaaatttcaacaaatgtattaaggaatactatttaataaaggccaacaattggtttctagtcagtcaattaaaaaaactgtatggaagtacagagcctaacaaaagaaaaaaaaattaccactgcaaaagaagtacttacacttctgactctcttatctgctttttgtttcaactgttctatctgtttggaagaaataaaaagaaaaaaatgaagtctcttgtctcaatgttgaaaaatcgcctttcctcatcaactgtcagagtgatatggcaaaaccccaattttccagcatttcaagttgctgataatttaaaggccacaggttgttttagcatggaaaaaaaggccctatgctaagaaccagaggctgagagtgaggttttcttctcgctattcactctctaatgtcctcatctgtgtatattcctagagtgcttactgtggcccagggatcagggagtatattctccgccctcatgaagcttctcaggtgaaaacactgagattcactgattctgtagagacatggcagacaaactacaaatgaataatgaagaacatttaataatgaagttgaatgaataaaagtcatcataacttaatttgacatagctactattaaatagcactatattagatataataggagaaataaagataactcatgatctctgtcctagaatcttatgaagttacagatataagatagcagaattaaataaaaatatgagacttcatgagctaccatagagtagtatgtgattaaatgtcacattcagatgagtctatgggggtaggttagactttatggaagaggtaagactggaacgagtcttaataattttagatagagtggaggtcatataagatggaaaaaattgtgggcaaagttgggtgacaggaatgtataaggaattcatatgctactgtaagttggaaggtaatttttggccagatttcataaaactatgttaagggatcaggactttatctcacaggtatagagaattaaggagatattgaaataaagggagatacatgatacaaggagtgctttagaattattagattcattttgacatagtgaaaacattcatattacttattttactacaaaatgtcacttgagttgagggggagttaagggaaagaaggcgaggcaaaaaggaagggctatttgaacaaaaatactcactgttaagctgtattggtgacagccttctcttactggccactcaagtccatctccttcagggacccctgaccacgtaaatacct

SEQ ID NO: 95912 - DNA, 13172 bp, Homo sapiens
cttttctgcatctactgagatgatcatgtgatttttgtctttagttctgattatgtgatggattatgtttattgatttgcatatgttgaaccagccttgcatcccagggatgaaactgacatgatcatgttgggtaaagtttttttatgtgctgctggattcagtttgccaggattttgttgaggatttttgcatcaatttctatcagggatattagcctgaagttttctgtttttgttgtgtctctgccaggttttggtatcagggtgatgctggcctcataaaatgagttagggaggagtcccttttttcaattatttggaatagttttagaagtaatggtaccagctcctctttgtgtctctggtagaattcagctgtgaatctgtctaatcctgggctttttttttttttttttttttttggttgagagactattaattacagcctcaatttcacaacttgttattggtctattctgggattcgacttcttcctggttcagtcttggtagggtgtatgtgtccaggaatgtatccatttcttccagattttctagtttatttgagtaaaggtgtttatagtattctttgatggtagtttatatttctgtgggatcagtggtgatatcccctttatcattctttattgtgtctatttgattcttctctcttttcttctttgttagtctagctagcagtctatgtattttgttaatcttttcaaaaaaacacctcctggattcattgatttttaaggggttttttaaatgtctctatctcctttgattctactctgatcttgtttatttcttgtcttctgctagcttttggatttatttgctcttgcttctctagctcttttaattgtgatgttagggtgtcaatttgagaactttctacctttctgatgttggcatttagtgctataaattttcctcttaacattgctttatctgtgcccccacagattctgatactttgtctctttgttttcactggtttcaatgaacttcttgatttctgccttactttcgttatttacttaggagtcattcaggagcaggttgttcaatttccatgtaattgtgtggtttttagtgagttttttaatcctgagttctaatttgattgtactgtgttatgagagactgtttgttacgattttagttattttgcatttgctgaggagtgttttacttccaattatgcggtcaattttagaataagtgccatgtagtactgagaagaatgaatttcagttgatttggggtagatagttctgcagatgtctattaggtccacttgatccagagctgagttcaagtcctgaatatccttgttaattttctgtctcattgatctgtctaatattgacagtagggtgttaaagtctcccactattattgtgtgggagtctaagtctctttgtaggtctccaagaacttgttctatgaatctgggtgctcctgtattgggtacatatatatttaggatagtttcctcttcttgttgaattgatccctttaccactatgtaatgcccttcttattttcctccatccctttgatttgagcctgtatgtctttgcgtataagatgggtctcctaaatacagcaaaccgatgggtcttgactctatctaatttaccagtctgtgtcttttaattggggcatttagtccatttacatttaaatttaatattgttatgtgtgaatttgatcctgccatcatgatgctatctggttatttggcacactagttgatgcagtttcttcctagtgtcattggtgtttatattttggtgtgtttttgctgtggctggtactggtttttgctttccatatttagtgcttccttcaggagcccttgcaaggcaggcttggtggtgacaaaattcctcagcatttgcttgtctggaaagaatagtatttctccttcactcataaaacttagtttggctggatatgaaattctgggttgaaaattcttttctttaagaatgttgaatattggccctcactctcttctggcttgtagggtttctgctgataggtcttctgttaatctgatgggcttccctttataggtgacctggcctttctctctggttgcccttaacatttttttccttcatttcaaccttggagaatccaataattatgcttcttggggtttatcttctcatggagtatcttagtgatgttctctgtgtttcttgaatttgaatgttggcctgtcttgccaggttggggaagttctcctggataataacctgaagtgtgatttccagctttttccattctccccctcaccttcagttactccaatctgtcataggttcagtctctttacatagtctcagtctctttacatagtctcatatttcttggaggcgttgtttattccttttcattcttttttctctcattcttttttctctaatcttgtctgcatgccttatttcagcaacgtggtcttcaaactccgatatcctttcttctgcttggtcagtgtggctattgatactgatgtatgcttcacgaagttctcttgctgtgtttttcagctccatcaagtcatttatgttcctctctaaactggttattgtagttaacagctcctctaacttcttatcaaggttcttagcttctttgtattgtgttagaacatgctcctttagctcagcagagtttgttattacccatcttctaatgcctacttctctcgatttgtccatctcattctccatccagttctgtgcccttgctggagaggcattgcagtcatttggaggagaagagactttttggcttttcagcattttttcattgattctttttcttcttcatgagttcgcttagttttgatctttgaggctgcagacccttgaatggggtttttgtaggaacttttttgttgttgttaatgctgttgttgttgctttctgtttgtttgtttttctttcagtggttaggtccctcttctgtagggctgctgtggattgctgggggtttacttcaggtccacttcatctggtttgctcccttgcctgggaggagcaaggaggctggagaacaacaaagatgggtgccttctccttcctctgggatctctgacttcgaagggcacaacccctgttggagggtctcacccagttgggtggcacagggaacaggacacatttaatgaagcactttgactgtccctcagtggaggggttgtgctgtctttggggggaaacccacttatctgggctgcccggattcctcagaactggcaggaggaaagagtaaatctgcttgtccgcagagactgcggccacgcctcccactaggggctcaggcccatggagatcagagttttgtccctgaggccctggctggagttgttggagttcctgcagggaggccctgcccagtgaggagggattggtcagggtcagggtcagggtcagggctaaagaggcactctggccagagtctgccatagctggtgtgttgggctgtggaggacacctcttgggaccaaactgttgagattccctaactccagcaggggaaaagcatggcctggagctatagagatggctgctgccattccctcacccagggagcttagtgtgttaggcagctattagtcccagtgttggctgttgcccttccccacaaggggctcaaactgcttagacagcagccagctgcagctatggtactggtcgcccctcccctagggaactcagccgacttaaacagattctacctgagaggctgtcgaaaatctgcacggctctgggcttgggagcctgggacccagtggtgtgggttcacgaatgtgatcttctgatccgtgggttgcacaattctgtggaaaaggcatggtttacccggttaggtagtgctcactcactgcctcccttggatgggggtggggtaggggtagggggtcctctgcccccagtggcactcaggtgggccacaggaccacactgctcttatgtcctatccttgggtcatggcagccgcctagtcagttctgatgagagaatctggatacctcggttgctggtgaaggattcacatgctattatagttcttttcgaaggggtcttctgatcacagctgcttccagtcggccgtcttgcctgcctctcccacctcacacctgttgcctttcaatagactggcctttcttcagccttagcaagacttaaaaaacttatgaagggagaatgggagaaaagcaagctagtcaatgtcagttcgaggctatatctatagtattatggcaaaactgcaattacttttgcaccaacctaatagtatgcacatgctgcagcctagttcattaggaatctagagtgggctttgaaaacaaaactttacaacttatatattattcaatcttcctttatctgctacagttgtttgtgcatacatctaccctgaggaactattccagcagtggtggctggtaaatggcagatgcttgggtgttgctatctgccctgggcaaagagcaccttcatgttatttcttaaacatacaacactctttagcataacttttggctacagattttataactataatccgcagccatgactcttgctaatgcttatgaagtgaaattttcaaagtgattgaattatcaattagttggtgagtaattaatgctctgtccctataaagtagaaaaatatgggaggatacctaacttctgaaaaagagaagtaataagtcaataaagaacttcaagaagtaccatttaaaaataggatttacaaagaaaatagcatgatgtgcaacaatcatataacaattgaggtggttactgcatgtttgggcattctaataaatgaaagatgtgatccataaaaacgttgttcctaaattttgctgatttattcaacaactacttttcataattgttgcagattgttctaggcactgaggttacagccactaaagggagaaaagtaccttgtcatttgggataaaactagatatatctatactttaagcctagatattctgttcctggttgtagcaaaggaatctaaatttaaaagctgtgtatacagctcaactgagtaaccatcaatatgaaatatagttcttaatctatgattggcaaccaatcatcgaaatgattttcaaactccaagaacagctatagcatttatatcaataaatatcacaggaagtcacaagacataagctatgcctctcaccttttttcggtcttcactgcttatagcattaatattataaactrtcattattctccagaggattatctcttttaagtcattcatcatcacctctgccacattacttatgtatattttattacttaagaaaaaagaaattaaatrtccaaaatgaaatttgtatcattttagggacttaaatctttaaagcaagggcattcagagcaaggactgagtttatagtcactattttctgctctatctaggcattgttcagaatttcagtcataaattactcaagattctgactgatatactttgctttttgacactgagttacacagttaattatatgtagaaagctttagaggtgactacaagggacaatttttctttcattgctttaatacatattacattttaattgataaaagtttctaatattgtaaaaatacatttaggtatgataattatttaaaggaatattctgacttccattttgaatatttgaaaaattaggctgcctggttaagtctccataataggtttaagaaaataattatgtaaatacagaaatttttaactacaaggtataagcataggaaagttataatcacatgattcagtattgggaaagtgttcccataaaaaattaattatgtacctgtatttttcaaccaccatgacaatgcatagggttcatagcgattctttataaatgctgaccctcatctcccaccaccagccctgccacatcacaggtcttctcatgtcccattaacaacttcatggtacatggtatgtactatgaaacatcctggaagtctattaaagcgtcatacagacccacatccaggaacagagccctttgctcctccctcagaatgaatgagacgagaaatcagatgtttatgcccaagaaaagtaggaatttgtacagcacttctcccagattgttagggtgctgactaaggatgagatggggtacccagagacaggagatgctattgcccagctcaaggaggtttgatgccattgaaggcaagtatcactgaggtttgatggtgctagtagcgttccagragctggtggagccaaggaaacaggttgctcatagtctccaatgggccctgactgtgggctcgtgtgtggaactgctgcaagctttcttcctggtggcagatgacatcatggattcatccttcacctgccggggacagatctgctggtatcagaagccaggcatggatttagatgccatcaatgatgttatcyttctggaagcatgtatctaccacctgctgaagatctattgcatctaccacctgctgaagatctattgccgggagcagccctattacctgaacctgactgtgctcttcctgcagagttcctatcagactgagattaggcagaccctggacctcatcacagcmccccagggcaatgtggatcttggcagattcactgaaaagaggcacaaatctattgtcaagtacaagacagctttctactccttctaccttcctgtagctgcagccatgtacatggcaggaattgatggcaagaaggmgcacgccaatgccaagaagatcctgctggggatgggagagttccttcaggttcaggatgattaccttgacctctytggggaccccagtgtgaccggcaaagttggcactgacatccaggacaacaaatgcagctggctggtggttcagtgtctgcaacaggccactccgtaacagtaccagatcctgaaggaaaattcaggcagaaggaagccgagaaggtggcctgggtgaaggcactrtatgaggagctggatctaccagcygttttcttgcaatatgaggaagacacttacagtcacatcatgggtctcatcgaacagtatgcagcgctcctgcccccagccatctttctggggcttgcacrcaaaatctacaagcggaaaaagtgacttagagactgcaagggaggcgagaggaggctgtcaataaataaattattgtgggaaaaaaagggggcatgcataacatagttttagggggtaagcaaatgtgcatctgtagaaggacagagatttagaatccagccctacaattcacaacacatggtatataaagtggccattgccattgcacttttaattttatgttactaatacatatatttggagtagaaatatactagttatggtacagtatattccatgatgtgaagtatgtagtataaatgggtttataggatataggatcaggatactctgagagttaatgttgctgagtaagaagcattataaacagcttataataatctaagattaaattatctgcatagaaggcacagcaacctgtaaaagaagaacattttttctcaatccaatagtgttaacactagctaaacaatagctactaatattaaacattgtacttatggtttgaaagtcaactaaacctataatttaaaatctaagaggaggaaaattttgtcaagattttgctcaacgaggtagacagtgagatgtcagcaagaaagatgcaacaacattttatttgtatatgtgcagcatattatctatttttctccaagaccgggagaaaataaaacttgataaaaacttcattacagtaagcaatagaaaaagtctattccagatttattggaaaactccatttataaaacacaagacaaattttggaaagtactttttttctgtaaaattcaataaattatgggctctattaaacacatgaacaaaattatattataatgactgaaatggaaaggtatccataaatgtggaaggggataagaaagctgaatgagtaaaaaatataaaaggaaactaaaatgccattgtacacgtggtttttaccagaaataacaatatgcagaagtgactctgtaacaaaatctgaatcttgatttcaattttaatgtgttaattgaatccagaagtcagagaaaaatagccaataagcagaaaatatccaaataagataatagatatttacgtaagagaaaaatccaatgtaagttcatattttctaaaaataatattagaacaaatgtaagaaaagccgtaatcaaagataaaatagacataagctttccggagttaaagaaatgcctgattttaaagattgacatgaatcactgtataatagaaaaaaatcaatgaaaagagaacaatgttcaaacttatgctgattaaattaatattcagagtaataaagacaataaatcaacattatataggcaacacttagggaaatataataaaggaatcaaaaatgcataaatggaattgctattgtgttaagagcattttctcatatcctcaaatattcttttaaaaatgttatttccatgcttcatcacatgtatataccaggattgagttagatttttcctattcgtggacatttgggttatctaaagtggtttgcattttaaaatagttctgttataggttttatatgcatatttttatagcatctattcatatttcttagactacttagaatcttggaagtagaattactgactcaaaaagtataaatatttaaatattcataatacatattttcaaattgctttccacagactttggctatttacacactcttcagcttgtccatcttcttttactcttagtcacagcttttctctactcatttacttaaggtttatgcattgtttcctttgcattcatcatagtgttatttctggagacataaagatacattgagagtcttaacattagaaagtttccatcccagtggaggcagagatagggagggatatattggaaatactgcataacagacaattataaaacactgtgataagaacaatctagaacagtgacagataaaagttattatgacagtcaagagaagacattcctaacccagaccacagagttcaaggacagtcccctggtaaagaagtaacgtactgagttgtgtgaaatgaattgaatccaataaaattaaatttgaatttaaggaagtgaagagagagagagagagaatgtaggaaggcaccaggtaatttcaagatggagagaaatataaacaaaagaacagaggcaagaaacacaaagaagcaagaatcatcaatagtttagtattcttggaaagtgaagcttgatggatggcatagtaaaatatcaggctagagaggatagatgtagccagatcatggagaatattggaaatcagttttaggagcttggcaattaaatactactaaaggccatcaagctgtcatagttgcatgttagagagattcatctggaagacatgtgtatagtgtacttgatggattagtttgtggtgatttcttcatcataagccaagttgttgacagttgattcaatctcacatgagttggtaactgcccagccctggtgtttactctaagaaagaattcatcgcccctatttttatttgggtgatggccaagcaacattttttagcccaatagctgttatgactatttaattgtttaagtcaaagtattataaaggacatctctagaagatgttctgtaccaataagaaatctggacaaaaataatcatctagataaatgcaaatttatttatataaataaatctattgcagtctgagttttttcttctctggcggtgtggaatgctttttcattctcactcatcttacttccttttttccttattttccctgaggtttgcatttcctaagtaattgtcaaagcaagaggtaaagttgaggagaaggcaaataaaagggtactttatgacctcaaagagagtgaagccagccccattgtcgcatagaactcatgtttatggtttcttttgaataaacataaaaattgaccttcagagtcttaaaacttgagagacttacatttgtcttatccaagttccttttccaagaaaccaactatcaggcttcccagacagtatcgaggaactgaaactcaccagatcgccacatctggtcaatgagatgctcgacccctcaccccttatgattgcctaactgatcacctgtgcctgttaatcaactcctctcccttatccttctctaattcctgttttctcacacatacttatattttccccctgctgtataaacccctaagtttagtcaactgaggcaacagatttgagattttatctccctgtctccatgacttcagcaccaaattaaagccttcttccttggcactactctttgtctcagtgattggctttctgtgctgcgagcaacagtacctaggccaaatccctggcctagtagcactcaggaatagtagcactcaggaaagggtatgccatttaatttccaggcttgcacaaaccctggtttgtggacaaggagaagatatttgtggatgaatagaggttcttctaaacatttttcatgcagatagttttattctaatcctgaacatatattatgtgttgctcacagaatttgattttttttatttaactcagtcgatcttatgattacatgaagattctctgcagttgattgtggtccctaccccctatgtttacatatatatttcagttgaaaatggtgaaaagatgtatcaaggaccgtaaagaaaatcatatttacactaaatatcctatttttacctgatacaagcttctaatcaattgtttgattgctaaccatttaactctgaaaaagtaatcaaaatttgaattttcagtatattatttgtttttcttttttatgtgactattaagaaaaaaatagaagattgtccatgtttttccttagtgtccatgtatcttaacggcaaataataaagaatgaattgttaggtataaaacatctttaaaaactaaaatctttcactacctgcttgttatgctctccaatgtgacttgcttrgccaatggaactttatcaaatataatgcagacagacacttgcaaaaagtatttgcatactagggtttactctcttgttggacttggaaccctatatccatataaatgagtataaactagcattctggaagatgaagtgccgttatggagaggaagtgatgtacccagctgacagccagtggtgacatatgtcagatatgagtatggcaattatagaatatcaccctaaactagatctgccagtcaaactgccagatgagtctatagatgcataaaagagcccagtatagatcaaaatgtgttggtcaagacacacacaaaaaaacattcgactgaccaaaaaaattataaggaaataaaaagaacattgttttatgtcactaagtttgggtgctttggtgtgtaacatgtttcgtggtgtgaattgctttgggttaaccctgggaaccacatcactgaattactgtcttcttgtgtggaacaaagtcagcatataatctcaatttccaaaatatatgttcatgcaatttttatgacagtgttactttttcatattttaaagatgaaatatattaaaataaaaatatccttactgtcaaaattcctttcagtaaaaaagtaaatttccaaatatttattctattaaaaacatgttttaacttcagcaagaaaaagtaaaatgggtacagatatacaactcatagctaaaatgatttttctgtatattaattatgtctttttaattgaaaatatgcatctaacttaggtataatgctgtctgtggttgtattactaatggaattttactctgaactgttcctctaaaatatcagcttgaacaaattgtataatggccaatatttagatacaattttttttttttgagacggagtcttgctctgtcacccagactggagtgcagtggcataatctcggctcactgcaagttctgcccccgggttcacaccattctcctgcctcagcctccagagcagctgggactacaggcacrcaccaccacgcccggctaatttttttgtattttttagtagagacagagtttcaccgtgttagccagggtggtctcgatctcctgaccttgtgatccgcccgcctcagcctcccaaagtgctgggattacaggcgtgagccatcgcgcccgttagatacaattttttaattgtgctatttcagtggaatgtctgatgttgtgtaatgatgcaggattgacttccaaaacaactttaaatttttgccatatgatgcatgtgaaagtcatcctaaaattctgttagtgtttactcactaactctgtgtcacaaatactgattgccttgtctactaagtgaaatctcaagtttggaaaacacacttaatcgtgattgtcaaggcactttgttctcacttagtaaataatgattagcttctgtcatttactggaaaagttaaacttgatgaagcagtttggcagtatattgaatttaacaaatcaaaatgatcatattagtgtgtgcgtcaataactgatattgaatgttgttaatatcttatagatgtaatcctccggttattctccttcttcacttttccaacattcccaagactataaaacaaacgtattcttaatttaaaatcattcaggctatatttataccaggctattgataatttaatcaagtttctaaaatcaattacactctactctctttaagtataacctcacattaccactaaagatgcagaaaatgaaatttgattgctttttcaggttattcatcatgagtacctagtggaaacttgccaagcaagctccctcaccagactctacactataccaaaatgtactcaccagtgttttatgacacttactgttcagtaatcagagttatcattctaggtcccacagtataagtttgtcctattgaagaaaatgaagtattatcaaatattgaacctctcatatttcttgataacactcagaggaactgcttagttcttattcatcatttctgcattttaaaattctgaacataatctacaaagtgatatctaggg

SEQ ID NO: 95913 - DNA, 20636 bp, Homo sapiens
  misc_feature (1)...(20636): n = A,T,C or G
tacttgactttgtatttaaagtggggttcttatagaaaacatatacttggtagggtgggaagtaaaataaaaagaaatacttgggtattggtttgatccactctaacaatctctatgttttaattgatgtatttagaccattgatacttatttttttatcctcatccctgtgattacccagagagctgcttaaattgattattgatatagacaaattaataattaatatctaccgtttgttactgttttctatttttcattgcccttactttctgctcctattttttgctcctttttctgttaatttaggttttgagtattttatatcattctattttctctcccttctcagcatatgaattatctttctttttgacttttttagtggctgccctgaaggttgcaatgtacatttacaaccagtccaattctcctttcaaaaaacacaatactgtttcatggctagtgcaagtacctaataataagaagtcactcctaatttctttctctcattctttgtatctttactgttattcatttcacttgtacataagctgtaatctttcaatacattattgctattattatttcaaaacatgttatctattatatctatttaaaataagaaaaataggccaggtgcagtggcttactcatgtaatcccagcactttgggagaccgatggattgctagagctcaggaattcgagaccagcctgggcaacatagtgaaaccctgtctctactaaaaatacaaaaaaaaaaattgctgggcatggtggcatgggcctgtggtcacagctactcgggaggctgaggtgagaggattgcttgagcctgggaggcagaggttgcagtgaaccaaaatcaagctactgcactccagcctaagtgacagagtgagaccctgtctcaaaaaaaaaatgaaaaagaattatttttatttatcttcacttatttcttctctaatgctctttgtttctttagtatgtagatccaagtttctaacctgtatcatttttcttatctcaataacttcttttaacatttctcacaaagcagatctactggccacagaatgcctcaattttcatttgtctgagaaaaccttatttctccttcacttttgaaagataattttgtagggtacagaattctaggttgtaggttttttcccctcaaagtgaaatatttcattccactcttttcttctttgtatggtatctgagaagaagtcagatgtaattcttatcattattacttaaaagattgcttctgttcctttctctcttctccttcccttctttccttctctgtatattacaccttttatagttgccccatatttcttagatattatgttttggttttcttctgtgtttttttctttgattctcagttttagaagtctctatttatatatctgcaatcgcagggattctttcctctgccatgtccagtctactaataagcccttacagacattgttgacttctgttccagtgtttttgatctctagcatttctctgattatttcttggaattgccatctgtctacttacattaccaacctattcttgtgtgttgtcttatcatagtaattgcagttgttttaatttcataggtattgtaatttcaacatctctaccatatttgacattgattctgatgcttgctctgtcttatcaagctatgtttttgtcttttagtgtgacttctaattttttgttgaaagccaggcatgatgtactgagtgaaagaaactcaatacattgtaatgtgacgataagagttcaggggaagtgaagcattctatagtcctatagcaggtctcggccttttagtgagcctgtgcctatgaacggtgactttcaacaagtgcttttcattccactcttttcctgtccttaagtgggacaagatcactgggggggggctagaattgggtatttcccttctccaatgtagaagctaaagagagggctggagttgggtatttttcttcccctgtatggaaagctagaggcagttaaatttggatattttccttcttctaattcagttaggctgcgacaaaaatcccgacagtttaggctctaatattataaaataatttctcttgagtataggccttattaagaacactatactctgatggagctgagggggagttttctctgatattcactgcgagaacctcgtagagctccaggaagcaaaactcacaaaagtgtgggagtcttccagaatttttcctttgcagacttatctgcactgaacctccagaaattcatcaattacagttcaggttttcctacccaggtactggttttcatggaggtttctgcctgtgcatttctgctccagtaagttgttcttcttgtatggtctgtctttcaaattttttaagtagggttatgacctgtcgcctcacttctctgacagttctgagagtgttgatttttcagtttgcttagatttttacttgtttttaggatgaagtgacaatttccaagctcctccctgacatgccagatcagaaactgaaagtcctaagcctcatattctgtgcgtgggtatgttcacatcctgcctgctccagtgcccccacctcacactctctttcccttccttgtccccttgtgagatttctaggtccaatacaaagactgtgttcaactcattcaactactttggctcatctgagtattataatgaacaatcacaaaaaaaaatgaagtaaaagaaaaatccatcaaagaattgagatatttgagaaaaagaaaggagatcagtgttttataaaacttagaaatagattttttaagtgtttcttcattgacttatgtgaaaggacttttcttaatttaacaaattatgtgctttcgtttatagcctcaaaacttcttgtgtagctaagaatgggtaaataatcaggctttactaaaggactaacgtaaagatcttctgtaagtaacatttctgctactcaaggaagagataaacttcatggcataaccttgccaaagtatactaagaataaccctgacacaaagctcttttttcagccaacatgccatgaaagaaagaagacaaggggtgatctccactctctaagtgaaccactaaacccaccaaagaagaaacgagggaaatagaaagaggacccttgcctgagataatggatctgtatgtatgagtagtagaaccctgctcaaagtacaaggaagggaaaaaaaagttagtttatttggaattttggacattaagagtctttattgttcattttcttttaactcacatgaatggcttatcacttcaattaataaatatttcatttcttttcaacatattcatgaaacaaatctgaaatgaacagtgcaacatgtgaatgtttagaacattataaaattaaacacaaaatctgtctggcaatcttcctagcatcttaggaaaaaagttgacaaaatttcaagcagcagaagggggcagtaaaactcaacagaaagctctggaagatttttaagattcttccttattttcttttcatgtagagtatttcccaacaaatttcagacgctaatagaaattttgtacaacagatccatatatttgcctaaaatagacacagaaacattgaatatatgcaaacatgagagctataagttttacatgatcaaaccttttttttatggtacacaatagtcacagtacttttccatataaaacaggtttagtggtcttaatttagtttggcacatttaatacactcccatgaccagcatcccaaatgtacctatccgttttattttattgtctcagaattgtcagttatttaataaattatgtaacttttttccttatgctcagatttgcacttctttctaaaactctgcccatccttaaagtcccagattctccttgaacttttttttttgactttccaagtacatggaactcttcactctatcctgctatataagtgacagaatttccactatgggatagatggagttcaattcctttgagtttaaaataatctaaatataattattccttatgccctgtttttccctcacttttgtatccaaatctcttttcagacaacagaacaattaatgtctgataaggaagacaatgatgatgatcacttcaaaatgaattcaggattgtaatgtaaaattttagtactctctcacagtatggattctaacatggcttctaacccaaactaacattagtagctctaactataaacttcaaatttcagtagatgcaacctactcctttaaaatgaaacagaagattgaaattattaaattatcaaaaagaaaatgatccacgctcttagttgaaatttcatgtaagattccatgcaataaataggagtgccataaatggaatgatgaaatatgactagaggaggagaaaggcttcctagatgagatggaattttagtcatccgtgtctcatgaagaatcagatgtgtacactaagcaaaacagttaaaaaaaaaacctccaagtgagtctcttatttatttttttcttataagacttctacaaattgaggtacctggtgtagttttatttcaggttttatgctgtcattttcctgtaatgctaaggacttaggacataactgaattttctattttccacttcttttctggtgtgtgtgtatatatatatgtatatatacacacacacatatacatatatatattttttagtatctcaccctcacatgctcctccctgagcactacccatgatagatgttaaacaaaagcaaagatgaaattccaactgtcaaaatctcccttccatctaattaattcctcatccaactatgttccaaaacgagaatagaaaattagccccaataagcccaggcaactgaaaagtaaatgctatgttgtactttgatccatggtcacaactcataatcttggaaaagtggacagaaaagacaaaagagtgaactttaaaactcgaatttattttaccagtatctcctatgaagggctagtaaccaaaataatccacgcatcagggagagaaatgccttaaggcatacgttttggacatttagcgtccctgcaaattctggccatcgccgcttcctttgtccatcagaaggcaggaaactttatattggtgacccgtggagctcacattaactatttacagggtaactgcttaggaccagtattatgaggagaatttacctttcccscctctctttccaagaaacaaggagggggtgaaggtacggagaacagtatttcttctgttgaaagcaacttagctacaaagataaattacagctatgtacactgaaggtagctatttcattccacaaaataagagttttttaaaaagctatgtatgtatgtgctgcatatagagcagatatacagcctattaagcgtcgtcactaaaacataaaacatgtcagcctttcttaaccttactcgccccagtctgtcccgacgtgacttcctcgaccctctaaagacgtacagaccagacacggcggcggcggcgggagaggggattccctgcgcccccggacctcagggccgctcagattcctggagaggaagccaagtgtccttctgccctcccccggtatcccatccaaggcgatcagtccagaactggctctcggaagcgctcgggcaaagactgcgaagaagaaaagacatctggcggaaacctgtgcgcctggggcggtggaactcggggaggagagggagggatcagacaggagagtggggactaccccctctgctcccaaattggggcagcttcctgggtttccgattttctcatttccgtgggtaaaaaaccctgcccccaccgggcttacgcaatttttttaaggggagaggagggaaaaatttgtggggggtacgaaaaggcggaaagaaacagtcatttcgtcacatgggcttggttttcagtcttataaaaaggaaggttctctcggttagcgaccaattgtcakacgacttgcagtgagcgtcaggagcacgtccaggaactcctcagcagcgcctccttcagctccacagccagacgccctcagacagcaaagcctacccccgcgccgcgccctgcccgccgctssgatrctcgcccgcgccctgctgctgtgcgcggtcctggcgctcagccatacaggtgagtacctggcgccgcgcaccggggactccggttccacgcacccgggcagagtttccgctctgacctcctgggtctatcccagtactccgacttctctccgaatagagaagctacgtgacttgggaaagagcttggaccgctagagtncgaaagaactccgtggatattccagctttcccacaagcactgatcattatgagccagttacttaaccgatctgagacactctcacctcctaaatagggatagatgatactaatttgcaggttgtcattatgataagacaggatctgatcaatatatgtgaattgtttatatttggaacctttttattgagtggaagaagttgttttaaatattctagtcagttctttcctgctcccaggaaagcccggattatgttttaagataagcaaaatgtcttaaaagtaagctgttttactttgaatttttccctaaatgttgattartgtactagatccattttaatttggaaagtgaagtgctacttatttgaacttcttaaaaatgctaattttaacatctaaagagttaactaagaaaagcttagtaacatgatgtaccaagttgaatatgctgttatccttatttagaatagaaaattggtatttctacgttttatccattctaaggcaggttaaaaaattgtatttccatgactacctatatatttcttgaatttattattgtaaagttgattcatagtcaaacaattaaatgtttaaattaagattaagacactagagaatgatttatttgctgtcctttaattgcagcaaatccttgctgttcccacccatgtcaaaaccgaggtgtatgtatgagtgtgggatttgaccagtataagtgcgattgtacccggacaggattctatggagaaaactgctcaacacgtaagtttgtcctttggttgcctcattaggagtgggkctggatacagttatcattgtatagatttgtgtcttataatgagtmccattaatttctccctscctttcttcgtcttcttgcagcggaatttttgacaagaataaaattatttctgaaacccactccaaacacagtgcactacatacttacccacttcaagggattttggaacgttgtgaataacattcccttccttcgaaatgcaattatgagttatgtsttgacatgtaagtacaagtgtctttctaaggtttttagcyttctcaaagaaaaatatgctttataatactgtaagcctaatctaaaaacatatttccaagcttatcaaaaagactttaagatagcttttaagtttgccttccatcttaatcgccaaaaatattgacatttagtcccatccagtttatacagtctgctcacaactctgtatacctcttctaacctttactgtttggtcagtttgtggaggtagcatggtccagctgtttattgaatgcccatgggccacagaattgttctgaacatgtagcacccattaaaataaatttggatttggatcagcaagaaaataactttccatgattctaaagtgggtgccatactcagccattcctttcataggcctcttggatagtgagcagatggctacctgaaaaatcaatattgccagattataatgtgcagagtatatgtattttattaaagatgtatttcaagtggccattagactataaagtgtagttgtttaaaaatagattttttttattttggagttacattcaacctcaggtgccactttccacatttyacaataaaaataatggttgatttacttaacaaatgagaataaataaaacatttttttctttgaaaatttcagccagatcacatttgattgacagtccaccaacttacaatgctgactatggctacaaaagctgggaagccttctctaayctctcctattatactagagcccttcctcctgtgcctgatgattgcccgactcccttgggtgtcaaaggtgagtaagaagaatccattagagatgtattaactataagacgggctgcattgctgccaaaaaaaaaaattgaccttagactaccatttatttattaacaaaagcagtttttacttttagcatggttatctatgggtattttttaaagtatgagtctatataaactattatgtaaaagcaaatgagcgtcttggtataatgtcttaatattttcaaattatttctttagaaatgaaataattctaattaaaatarataaaatcattcagtaagaagttgttccaccatatcttagaactgttgtttatattatgatcctattcacaattgtaattctcatataaatgaagaattcttggtagattgacagtcaccatctcctttcttgaatacatagatggattcttaccttagctttctcatttttcaggtaaaaagcagcttcctgattcaaatgagattgtggaaaaattgcttctaagaagaaagttcatccctgatccccagggctcaaacatgatgtttgcattctttgcccagcacttcacgcatcagtttttcaagacagatcataagcgagggccagctttcaccaacgggctgggccatggggtaagatmgagttaatatcttagagttagtaaaattataccaaatcatagtcaagggctaacattaaaggagatatacagatagatagatccaaataacttatccactttttttaaaaagaagtcttatctataaaaaccttaaaggaattttccatttacttcactggtctagtaaaattatacacacacacagacatgcayacacatatataaacattcacacacatacatatgtacaggtattgttatttgtaatttgacccttgtattttttagtttaaaatgttagtactgcaaamtgttatgtcctcaaaaacacattgtaccatgattatgccgctttcaatattgtaaagtgaggtttttgccgcattattattttttggatttcaatagcatagcttcaagttattcgtaagaattttttataaataatacatttttatacttttttakaattaccatatcatcatagtgaagtatataatatatatgatataagctcaatatagtatattaattccyttaaacacaaagacatatcagtttgtagctttggtggataaacaaattaatttagcaattcatggctatgaaaaatgtatattttatttaaaaattttaaagaaagctaaatgatcaaattatttaatgatgaattatatgatagacactttatataagaaaaacttcaacagcaacaaattaaaattttttcatcattttctaggtggacttaaatcatatttacggtgaaactctggctagacagcrtaaactgcgccttttcaaggatggaaaaatgaaatatcaggtatgcttcctttgactattaagacttagttattaccncttatacccatattttaaaatccctaaaaatgtgttccttaactttttaactgatgtttatttatttatttatttttttagataattgatggagagatgtatcctcccacagtcaaagatactcaggcagagatgatctaccctcctcaagtccctgagcatctacggtttgctgtggggcaggaggtctttggtctggtgcctggtctgatgatgtatgccacaatctggctgcgggaacacaacagagtatgcgaygtgcttaaacaggagcatcctgaatggggtgatgagcagttgttccagacaagcaggctaatactgataggtaaacaagaaaatgatttatataaaaccctcttccccagggaaaattagtgtgctatctttgttatgttttgagtaaatgacaagatgtggtaaatgaaaactcacacaytctatatacattaaatatgtaagcatgactgataaaatagctatcttttgatactgacaaggaagaaaacagaaatgaaggaatagcaaattttaaaaattgcattccasttgcttgaaagcttgtgatcagatgyaataaatgtttttattatttattttgtgcaaataggagagactattaagattgtgattgaagattatgtrcaacacttgagtggctatcacttcaaactgaaatttgacccagaactacttttcaacaaacaattccagtaccaaaatcgtattgctgctgaatttaacaccctctatcactggcatccccttctgcctgacacctttcaaattcatgaccagaaatacaactatcaacagtttatctacaacaactctatattrctggaacayggaattacccagtttgttgaatcattcaccaggcaaattgctggcagggtaagcattattattgaaaaccaaaacaaaagactagtcagtaactttagaatttctgccacggaaattatttttcttaaacttactaaaagagtagttagttatattgctagtaaaattattttattgatataagaagcctaactttgtttgaaaagtctaaacttttagtctagtctacagttgtcagacaaatagcaaattgtacccctaccttaaaaatattttcaaaaagtatctataatcttataggaataaatattttaggcttgaatactagtgttatttttgaaatgtaaaaaggcaaattagttctaggctggtgtcccattgaattttaagcagagctcctgttgaaatgtaggtaagcatctttccagcaaataaaaattgtctccgctgggagtttcagttttacctgatttgtacctaaggcaagctgaatacaaacagtaaatatgcctaaaattctkgttttacaactaattttactttccacaggttgctggtggtaggaatgttccacccgcagtacagaaagtatcacaggcttccattgaccagagcaggcagatgaaataccagtcttttaatgagtaccgcaaacgctttatgctgaagccctatgaatcatttgaagaacttacaggtaagaaacagtttctaaacttcttcgttttttgtttgtttgtttgtttttgttgtttttggttttcttttygagatggagccgccctctgtcacccargctggagtgcagtggcgccatctcggctcactgcaacctccgcctcctgggttcaagcaattctcctgcctcaacttcctgagtagctgggactacaggctcacgtcgcacgcatggataattttttgtattttcagtatagacrgggtttcaccgtgttagccaggctggtctcaaactcctgacctagtgatccgccggcttcggcctcccgaagtgctgggattacaggcgtgagccaccgcgcctggcccctaaacttcttaaaagaatcaggggtcaaatggaaacagagaagttggcagcaaattgagcaaaagaatcaaactgtyttttattttgtgaagtttgacattggttgtatctctgtcttcatcgccttcacaggagaaaaggaaatgtctgcagagttggaagcactctatggtgacatcgatgctgtggrgctgtatcctgcccttctggtagaaaagcctcggccagatgccatctttggtgaaaccatggtagaagytggagcaccattctccttgaaaggacttatgggtaatgttatatgttctcctgcctactggaagccaagcacttttggtggagaagtgggttttcaaatcatcaacactgcctcaattcagtctctcatctgcaataacgtgaagggctgtccctttacttcattcagtgttccagatccagagctcattaaaacagtcaccatcaatgcaagttcttcccgmtccrgactagatgatatcaatcccacagtactactaaaagaacgttcgactgaactgtagaagtctaatgatcatatttatttatttatatgaaccatgtctattaatttaattatttaataatatttatattaaactccttatgttacttaacatcttctgtaacagaagtcagtactcctgttgcggagaaaggagtcatacttgtgaagacttttatgtcactactctaaagattttgctgttgctgttaagtttggaaaacagtttttattctgttttataaaccagagagaaatgagttttgacgtctttttacttgaatttcaacttatattataagaacgaaagtaaagatgtttgaatacttaaacactrtcacaagatggcaaaatgctgaaagtttttacactgtcgatgtttccaatgcatcttccatgatgcattagaagtaactaatgtttgaaattttaaagtacttttggtyatttttctgtcatcaaacaaaaacaggtatcagtgcattattaaatgaatatttaaattagacattaccartaatttcatgtctactttttaaaatcagcaatgaaacaataatttgaaatttctaaattcatagggtagaatcacctgtaaaagcttgtttgatttcttaaagttattaaacttgtacatataccaaaaagaagctgtcttggatttaaatctgtaaaatcagwwgaaattttactacaattgcttgttaaaatattttataagtgatgttcctttttcaccaagagtataaacctttttagtgtgactgttaaaacttccttttaaatcaaaatgccaaatttattaaggtggtggagccactgcagtgttatctyaaaataagaatattttgttgagatattccagaatttgtttatatggctggtaacatgtaaaatctatatcagcaaaagggtctacctttaaaataagcaataacaaagaagaaaaccaaattattgttcaaatttaggtttaaacttttgaagcaaacttttttttatccttgtgcactgcaggcctggtactcagattttgctatgaggttaatgaagtaccaagctgtgcttgaataaygatatgttttctcagatttyctgttgtacagtttaatttagcagtccatatcacattgcaaaagtagcaatgacctcataaaatacctcttcaaaatgcttaaattcatttcacacattaattttatctcagtcttgaagccaattcagtaggtgcattggaatcaagcctggctacctgcatgctgttccttttcttttcttcttttagccattttgctaagagacacagtcttctcatcacttcgtttctcctattttgttttactagttttaagatcagagttcactttctttggactctgcctatattttcttacctgaacttttgcaagttttcaggtaaacctcagctcaggactgctatttagctcctcttaagaagattaaaagagaaaaaaaaaggcccttttaaaaatagtatacacttattttaagtgaaaagcagagaattttatttatagctaattttagctatctgtaaccaagatggatgcaaagaggctagtgcctcagagagaactgtacggggtttgtgactggaaaaagttacgttcccattctaattaatgccctttcttatttaaaaacaaaaccaaatgatatctaagtagttctcagcaataataataatgacgataatacttcttttccacatctcattgtcactgacatttaatggtactgtatattacttaatttattgaagattattatttatgtcttattaggacactatggttataaactgtgtttaagcctacaatcattgatttttttttgttatgtcacaatcagtatatyttctttggggttacctctctgaatattatgtaamcaatccaaagaaatgattgtattaagatttgtgaataaatttttagaaatctgattggcatattgagatatttaaggttgaatgtttgtccttaggataggcctatgtgctagcccacaaagaatattgtctcattagcctgaatgtgccataagactgaccttttaaaatgttttgagggatctgtggatgcttcgttaatttgttcagccacaatttattgagaaaatattctgtgtcaagcactgtgggttttaatatttttaaatcaaacgctgattacagataatagtatttatataaataattgaaaaaaatkttcttttrggaagagggagaaaatgaaataaatatcattaaagataactcaggagaatcttctttacaattttacrtttagaatgtttaaggttaagaaagaaatagtcaatatgcttgtataaaacactgttcactgttttttttaaaaaaaaaacttgatttgttattaacattgatctgctgacaaaacctgggaatttgggttgtgtatgygaatgtttcagtgcctcagacaaatgtgtatttaacttatgtaaaagataagtctggaaataaatgtctgtttatttttgtactatttaaaaattgacagatcttttctgaagataaactttgattgtttctatacatctttgtcatatgacataagatttctctgaagcattactcttaaaccattatcttgcattctcctacctattcaaaactaggactggcccttcatgaaatggttttgccctcaattatatagaggcttcctagagtcactatttaaatctcataatccttattcactgcgacactgtgttggaaaatgtctagtttgtgtatctttacagaagatggcaaacaagcttattttcattgcctagtctagaagaagaagaaaaaaatacacaataaggcaaagaataagacatatattatgaagggggcacaaagttaagaagttcaaagaggaggaaattatacaaagttgggcaaatcattgatgcaaaagctcataggcttttgttgtacctctatccttgacatcttggtaatttcaatatctacatggaccacatatttagcatcttccctggcctctcctctttggccttctccattccagggatggcctcttccaccatatttcctgaaatcatacatatcttgatatcattatgattaattacagcaccactttcaaaatcttgattccaagcatcttccagctcacctattttattgcttacactctaacatctaactctcagtctcactgaacctaccgatccaccaacctcatcacttcactatttatcacctgttttatctttccatttacttccatatgcatctagctcagattctattgtccatcattctaatcattcccctctgctctgtatattctccctctactgtgctgaattgacacaagttgattaaatccagccattctcctaatctgttttttatttggcttctcagtagcattcaacacaaatagctataatctctttactgaaagaacccctgccccaaccttggcttcatggtttgatactctcctggtctttctctacctttctcagagcactattgctcagtcttttctctctctcttttttttaagctctttctcttctactgtatgtataagttgaagtgtcttgatatctgctctgtctgcattcctccagattaatcacatttaagctcattatttgaaataataagcactcagaaataagcactccaggaccaacgtctaattgtcaattgacaacatctccaaattgtcaattgacaacctctccactcaaagtcatcaatttaattgcttcttttacattcttccctcccagaaccatatatcccaaataataattgtccaacgttaaagacaccaccatactctttccttcacttgcatagccaatccaacagcaatcctgttgactacaacccacaaataaatcttaaatctgtcaccttttttccaacttcacaacctagcagtgtaatagtctattaattggtgttctcttgtctattctttcctcagcccaaaccattctccttatggcagtggcagtaattttatatatatatatacacacacactttatactttaagttctgggacacatgtgcagaacgtgcaggtttgttacataggtatacatgcgccatggtggtttgctgcacccatcaacttgtcatctacgttaggtatttctcttaatgctatccctcccctagccccccacccttcgacaagccccagtgtatgatgttcccctccctgtgtccgtgtggtctcattgttcaactcccacttatgagtgagaatatgcagcgtttggttttctgttcctgtgttagtttgctgaaaatgatggtttccagcttcaaccatttccctggaaaggacatgaattcatcctttttaatggctgcatagtattccatggcatatatgttccacattttctttattcagtctgtcattgatgggcatttgggttggttccaagtctttgctattgtgaacagtgccacaatgaatatacatgtgcatgtgtctttatagtagaatgatgtataatcatttgggtatatacccagtaatgagattgctgggtcaaatggtatttctggttctagatctttgaggaatctccacactgttttccacaatggttgaactaatttacaatcctaccaacagtgtaaaagcgttcttatttctccacatgctttccagcatcagttgttttctgactttttaatgattgccattctaactggcatgagatggtatctcattgtggttttgatgtgcatttctctaatgaccggtgatgagctttttttcatgtttgttggctgcataaatgtcttcttttgagaagtgtctgttcatatcctttgcccactttttgatggggttgtttgttttttcttgtaaattcatttaagttctttgtagattctggatattagccctttgtcagatgcatagattgcaaaaattttctcccattctgtaggttgcctgttcactgtgatggtagtttcttttactgtgcagaagctctttagtttaattagatcccattagtcaattttggcttttgttgccattatttttggtgttttagtcttgaagtccttgcccaatgtctatgtcctgaatggtattgcctaggttttcttctagggtttttatggttttaggtcttacatttaagtctttaattcttcaatgcagaaaagaccttcagtaaacaccccctcatgctaaaaactctcaataaactaggtattgatggaacatatctcaaaataataagagctatttatgacaaacacacagccaatatcatacctaatgggcaaaagctggaagcattccctttgaaaactggcacaagacaaggatgccctctttcaccactcctattcaacatagtattggaagttgtggccagggcaatcaggaaagagaaagaaataaaacttattcaaataggaagagaggaagtcaaattgtctctctttgcagatgacatgattgtatatttagaaaaccccatcatctgagcccaaaatctccttaagctgataagcaacttcagcaaattctcaggatacaaaatcaatgtgcagaagtcacaatcattcctatacaccaataatagacaaacagagagccaaatcatgagtgaactcccattcacaattgttacaaagataataaaatacctaggaatccaacttacaagggatgtgaaggaccttttcaagaagaactacaaatcactgctcaacaaaataaaagaggacacaaacaaatggaagaatattccatgctcatgggtaggaaggatcagtatcttgaaaatggccatactgccccaagtaatgtatagattcaatgctatccattgactttccattaagctaccattgactttcttcacagaattggaaaaaactactttaaatttcatatggaaccaaaaaaaaagagcccgtatagccaagacaatcctaagcaaaaagaacaaagctggaggcatcatgtacagtaaccaaaacagcatggtactggtaccaaaacagatatatagaccaatgaaacagaacagaggcctcagaaataataccacacatctacaaccatctgatctttgacagtcctgacaaaaacaagcaatggggaaaggattccctatttaataaatggtgttgggaaaactggctaaccatatgcagaaaactgaaactggaccccttccttacaccttatataggcagtaattatgttttaacataaatcatatcatgcctttcccatgtttaaaatcttccagtagcttcctactacacaatggaaaaatataatcttcttatcctaccctatgaggatctcaatggtctattccctgcccatctatctgagcttatctactaaaattccacactcttattcattatgctccagacacagtggctttcttgtgatttcctcagtagctgtgattctcaggtgttgccctattttgaatatttcttatgcagattttcacatccttctcaacatttagatctcagctcaaatttcccctttttagaaagggcttctccaaccaccaaactaaagcaactactaaggctgtttgattttctttataccatttattttatctaatattgtcttatttgtgtgtttactatctatgtcccctttctggaattttgtgtctgtgaaagcaaggaccttgcctgcattattcacaggttccagaacagtgcctgacatttaaaaggcattcaaaaataaatatatgattaataaataataacagacttcatgaaagaagtagaatatgtggtgattcttgaagaaagagtaagatcttagagagcagagacatccacgatgaaaaagtttggtaatttattcttgaattaaaaattcacttacttatatgtaatgcctttctgcttatgttattaacaaaatactgcaaaattatgagctcaaattcattatctaaagttctggaggttagaagttagaacttctaacttatgaactaaaatcttatgaattttatgaactaaaatcttatgaactaaaaacttaaaaacttatgaactaaaatcttatgaactaaaatcaagatgtcagcagggctgtgtttcttccgaaagctctaggggaatttattccttgacttttccagcttctaaaggttgccttggctcataatttatttctccatctttaaagccaacaggatagcatcttccaaagtctctaactcggattgttttaccttcccctctcataatgacccttctgattgccctggggcccatgcagataatataggaaattctctcctgctcaagatccttaatttcttcacatttacaaagtcctttctgtcatgtaagataacattcacaggttcttgagattaaggcatggacattttgggggagccattattttgtttaccataccacacaacccaactgtatttgcactcttgaccaattatccaagaattgtacttcttggcctttaccccccaaaaataaaaacctatgttcatgcaaaaacctgtgcatgaaagttgtagcacatttattcatgatagccaaaagctggaaacaacccaaagtccatcaatagatgaatgattaaactaactgtaccaagctgtggtatctctgtggtatcaatgaaatactatatagtgaaaggaaaaaagcctactaatacacacagcactttggatggaactcaagggaattatgtgtaaattatgctgagtaaaaaaagccagtgttaagttccacgtgtaattccatttatataacattcttgatataacaaaactatagaggtgaagaaaatatagtggttgcaagattagcaattggtgggaggattagaagctataaaagagtagtgtaagggatatgtgtgctgcttgaacagttctttactttgattaaggtagtagttacacaaatctctatacatggcataattgcatagaactatacacacacaaaaaaacatgtaaatgcatatataaattgtgaaatgtaaatatgttctgtggattgtaccaagatcagtttcctggttttgatattgtactataattatgcaagatgtcaacattgggggaggtattatgaagtttgcatctttcctctttatacatttctttgcaactttctatgaatttataatatttcaaaataaaaagccttttttaaggaaaagatgcaaggttcttcttgttgatggggttaggtttgcaagccatttttgcaccacatgatttcctttatcctcatcaaaactgccagaatagattatccgcagaatgaatactgaacccaagctagaaaataaaattccttctcttaggagtttggcaattaggatgaagaacctagttcagactgacaattttacagttgacaatgatgactatgcaatctgattggtaaaccaaaatctcttttcagtaaatagtataggaactactgaacattcgcacaaatagaaagaaccttaattctacctcacaacactcacgagttaatt

SEQ ID NO: 95914 - DNA, 85345 bp, Homo sapiens
  misc_feature (1)...(85345): n = A,T,C or G
ctctgctgccgactaactgtgcaagcttggacagggtacctacctctcttaacctcaaagtcctccatggaaatagcgggtaaggtgtgaagattaaagaaatagcacgcttcttaaagcactcagcatgtcagtggatgttgggagccttccctcacccctttgaaaatgggctctgcacaaacacattttggtgggaggctggggtctatcctaccaacctgagttgggggaataagatgatctcttccacagttcgggtttgcacaaccagcttttgcaggtgaggcagggaagaggcatgagtgtcattggcagagtgataagcgaggctggcaagttcactttggtagaacctctgtggactccttagttcttccaggttgaatcctgggcagaaatcacatgaaagctgtgaagcacagacatcagtttagaaattgtgtactttcccgctgaatcccaaatgcacaataactgtacaccttgcggttgcatgaatctacaaggtctcctatgcgccctcattcataaactcaaggctgagaatgttggcaggccaagtcctgcccctccccggagtgagctgccttggttcacacgggagtggtccagcgacaggacccgacacctcccctccggaagctcttcagcaggacctgcctcgggtcctggggcagctatcctccggggcctgcctgcagtgaaaccatcagtccgtggagatgttcactggattcctgaccagttgtgggtcgggctcaaccctccctctgggttttcaggatttgtaatgatcgctccatttgtgtaaaataggccggcattttctcttgttactgagatgtatttttctatgtgagttaaatgtataatttgtgtaattttgtacattaaaatgtatgctttttcacaattaaagggtttttttcccttctgaatgttttatttattgatggtttgttacaaagtgttgtcgaccctgacgtaacagaaaaaggcaatggagctaggattcccttgatttttggtggggaataaatgcttttcttggtactcaaatccactttgcacaaataattaaatgatttcctttataatcatgtagtgatttctgattgctgctttgacagatgaccatgaacccattgccttagaacaactcacattcattatcttgtagttctgaaagtcagagtccctgggctacaaccgagatgttggcagggctgccttccttctggaggctccagggagaaagtgtttccttgccttttctggctcctggagttgcccacattctttggcttgtggccccttccttcctcttcaaatctctctcactctgacctctgcttctgttctctgatctcccgttctcagactccgactttcctgcctctgtctcacttaaaaggactcttgtgatgacactggctccaccaggtgatccaggatcatctccacatcttaagatctgtaagcagagccacagagtcccatttgccatgtggagtaacatgggcagtagttctagggattcaggtgtgggcatctttgagcatcattattctgcccaccacagtcccatatgtactaatttggaggccacagaaaaaagcagacatttaaaaatcaaatgagcctggatttgaactgcatctctgtcacttgctggccatgtaaccgaacatgtttacttgtttaacttctctgaacatcttttcttatatctgagatgaggacaataatccattactatatacctgatgataaactacaatcccctttccttcattttttgaaaacattctttttgcaatgaatgaatgaatttttttttttttttttttggtttgccgaaacaaaatccacatcggacctgaactggcctcttgtcctctcccatctgacgtgtccctttctgttctctgccatcacccaggaagaaggtttcatgtctgacatgatgagctcaaggtttgtccttcaccaaatgtagtgctgtaattcacttataagaactccttcccaggaggactaggagcagttggaggatgggttgggggatgggggaggtcacagctgtcgtcaggatgggggcagttatctcaggcttcccctgctgactctgttggtccctggcaaatattgctcctttctgtctccgtgcaagctggagggtgcatttccaactttataccctgggttttgtttccttcctccctttctctgttgcgcttgggttactgaccttgagatgagatggtgtggaaaaaactcagacaaacctgagttgaaatcccaggttagtcacttcccggtggttaacctgagcaatgggcttaaggtttgtcatcctcagcgctccagcctgaagatggaagtggcctggttcgccacgtggggctgcctgagggagccagcagtgtataaggcagagcatgatgcacggaaatgaactgtgtgtgcaaggacccttatacacagtatgcagtttcaggagggtccgatcgcctcctctgcatggggagaaaagagtgagaggaagtgatataaagtcagtgacacgcagtgggcgccacaaaggtgtgttagatgaatgtcgaatgattagttgcccaagactgcatgcaaaacaggattctaactcaaccacctagactcttctgcctaaactaggtccctttatctcttatctcccagtgggaccacctcagtcaggctcttggggagaggaaagggtagttgtttcgatgtggactctggcaccagactactctgtttaaacctcgaagtcttacttgccagctgtgaccctggacaggttatttatgtctctgaacctcagttttctcatctgtaaaatgaggctaaaatggcagtttcaaggttgctgcgaggcataaaagagttactatctgttaggtgcttaccatggtccgggcacgtagtaaactttctataagcagaagctatgaagatcctttcctgcttctgcataaagacagcactttctcagctccttccttgcgtcactccctctagtcttggcaactgcccagccctttctcacaatggaaagggttttctttagaagcagtaagatttccatcaccaccaacaaagcctgagagactgtgtcctcaagatgttgagagcagattcaagcatgcagtaggaggcctggcctccaaagttccacctaactcagacttttgagttttctgatatttctctgggttatgtcaccctgaacatttgtggggttttagaagaaatttctatgtggttttcgacatgaattgttcttgcctggaatgggctgggaatagtatttcacaggacagagaaaaattttcattgaaaaatcgaaaacacttgcaagatagcctggaggctgatgggcctcaagaggagtgtctgtggcaaatctgcacagtggacccagggacacaaggagagaggagccaggatgcagctgcggtgggtggaaggtagatggaggctgtgtgtggaactttctgttctcgcattcagcactctctcccccattagagtaaacacttgttgaagacagagacttagaaatactcatctgtgtccccacactagcctctctctcaagcacagaaaaataacttgctaaatgcccaccgagtggatgagcccacgctctaggcctggctgaacctccttgagattgaggccctgagggagccatttcacatctcccctcctgtttcctcttccaagagggggccggtaaaaatacctacctgctgcacagaccccttgttgcagggttgaaagacagtagcttcagggaggtgtcagctgaggccacggatccgacggccccaggatcctcagtccatggggcccaagagtcataaaacaagaacatgaatccatctgtctgtctggtattcctggagcttggtcacgctgcgggagctctggcttgcagctggcagggcccggggttgaagggacagctcccagcatggaaggctatgggtggggggacattgcaagaagcactgatgctcccctctgcagtccccacccagtcctgactttgcttgtctagactggctcgaggagggggtcggcagctggcgattctgcctctccaggaagtgcagctgggactgtagggtccccagggacttgcaggatcctctgcctgataatcgtggagaaataagggaaggtgtctataggaggcaggtggtgcctggccttagaggagagccccagcagagcgacctccacgacagagaaaccccagaacgcccagactgcaagctccaggagcaacaaaagtggactgtgcccctcgaatgagggaatatctgtctgtctggttgactgccagctgtgtgtgtgtggtcatctctgtctctgtgtgtctttctctggagcgtttttatttaagcttttgacttcctttattactggtgtggacttgtgtgtgggcatcctgttgccagtttatgatgcacatgtgtggaatcgccctgagcttgcctttgatattggtgtgttgtgtggtgtcattggcgtgcacgtgtatgtgtgtgtcgctgattctcatgcaagaatgtgcttctcttatgtgtctgtcggagtgtgcctctagcatgtccctcttggctgctgcaccacctttcctggcccttaccacctcttggcccaccatatgggtgcttttgtatccagttcccctccttagcaggtcagctcctggagggcaggcacttggtctcttttgtccatggctctgttcccagctcctacaacagtgctaggcactagtgggcgctcagcaaaataaaactgacggaatgaacggtgtgtccaacgcatgtgcctctccagttgtgcaattaatcttggtgtgatactgtgtgtgagtggggttgtgagacaatgaggatttctgttgtgtgtttgtaatgaactcggaatgtgcacaagcatatatgtgtatgtgtgtgcaacattgagtatggtgtgcatgatcgagcccctgtgtatctctggagagcatgtgtgattgactctcgtgtgtgtgccagcatgtctgtgcatctctcatgtgtttggcgtaattgtctggtgtgcaggtatgaacccgcgtgtgcctccagagcgtgtgggcgcgcgagtgtacgcacacggctcctgccccgcgctctcctcgcgccctgcgctccgcctgggggcggagagtggggggnnnnnnnnnnnnnnnnnnnnnnnnnnnnnnnnnnnnnnnnnnnnnnnnnnnnnnnnnnnnnnnnnnnnnnnnnnnnnnnnnnnnnnnnnnnnnnnnnnnnnnnnnnnnnnnnnnnnnnnnnnnnnnnnnnnnnnnnnnnnnnnnnnnnnnnnnnnnnnnnnnnnnnnnnnnnnnnnnnnnnnnnnnnnnnnnnnnnnnnnnnnnnnnnnnnnnnnnnnnnnnnnnnnnnnnnnnnnnnnnnnnnnnnnnnnnnnnnnnnnnnnnnnnnnnnnnnnnnnnnnnnnnnnnnnnnnnnnnnnnnnnnnnnnnnnnnnnnnnnnnnnnnnnnnnnnnnnnnnnnnnnnnnnnnnnnnnnnnnnnnnnnnnnnnnnnnnnnnnnnnnnnnnnnnnnnnnnnnnnnnnnnnnnnnnnnnnnnnnnnnnnnnnnnnnnnnnnnnnnnnnnnnnnnnnnnnnnnnnnnnnnnnnnnnnnnnnnnnnnnnnnnnnnnnnnnnnnnnnnnnnnnnnnnnnnnnnnnnnnnnnnnnnnnnnnnnnnnnnnnnnnnnnnnnnnnnnnnnnnnnnnnnnnnnnnnnnnnnnnnnnnnnnnnnnnnnnnnnnnnnnnnnnnnnnnnnnnnnnnnnnnnnnnnnnnnnnnnnnnnnnnnnnnnnnnnnnnnnnnnnnnnnnnnnnnnnnnnnnnnnnnnnnnnnnnnnnnnnnnnnnnnnnnnnnnnnnnnnnnnnnnnnnnnnnnnagctctcccggagagcgcgacgagcggccgccgacgctgcgcatccgccgccccgcgccccgcgacctgcccctcggccgggacaatggccaggtaccctcggggcgcgcgcgggccagacgaggggggcgggccccgggaggacccagggcatggggcgcccgagggccatgcccgggccccggtgttggggcagcggccgccaggctggggagagccacggcgcggcccctcccccacctcatcatgcaagaggttcccagagctggggcgactcggtcggggctggccggcgtggtccgtgagactcggaagggatcgcccgggtccagtcccggctcctcttctacagaaagggagagaggttctgagaggggaagttggctaaagctaccgcatggacgcttaaacgcgaaggaacctctgggatgaatctaacccaggcccctcattctgttttgtgaaaagaactggagctccgttccgtgttggtccattcatccatccactcagtcggtagtaattatagagcacctactgtgtgccgggccccgggagaggttccgcgagtcgcctgcggccacacagcttaaagctggaaggagctttttttccgagcgctcccctcatgcttgctggggggaaggatttggttaaggatttagttcgtcgggcagttggagccgtaaacccctaccctcaagcgccagtagattcaaggggcactcctgagctccacagcacacaccgatgtgcctgcttcacagagcaaggtggaggtagagctgggatttgaactggggtctctagcctcccggacctgagcatggggccgggaggatcagggagagggaacgctagggcttgggccctgcgggtattctctcttgagctgggggtcaccaggaaactgggggaagaagggcggatggacggcgtagcctttggatggaccgacgagagccagggtcaggtgccagaaaaacggaagttggagcatccgagggctggggagctttcgaattggtccagacctggatgccggagaactgctaggtgccaggcccagggtaggcgctaggtccctggctcagcaacctggccccaccctccagaagttcccaggctagggtgagcgacggattcattgtgagaattaaatcagttaatgccggtcggtagtgagcattcaataaatgtttgttgttgacttttattacaatcattatcattttaattaaaccttcccctcttaaatgctatgagtgacccaaagtgagcctggagggaagcagagcttgatcggggcagatatctgggagggcttcctggaggaataggagcagggaactggtaaactcggtggtgggcctcttcgggccccatcccttcgcgggcgggctgtctgttgctccagagctctccgtggtcctgaagccggagcctcgcgagggagaggtccaacagcaagggtgtgtgtgtgtgtgtgtgtgtgtgtgtgtgtgtgtgtgtgtgtgtatgtgtgtgtggtggtggggtgatcagaaagggagatggtgcgagagtccagcttcctcttcccccaccccttctgtatctccccctgtccactaccttccctggtggtccgacctctcttgggatccaaactcccgagcccgatggggaggcttctgggccgcgggccgagaagcgggaccagcaccagggaatccgggtttccagccaaggcgctttgctctcttgggcctcagcttctccatctgtcagatgggggtggccgtcttcttccggccttcctcaaagcgtggtggagtactagggaggcgagggcgctttgtgcacggcccgtagctgtcccaaggagagttcctctggaactgcggtcaatgtcaccaacgccagcatctcccccagggcgcagcctgggccagccccgcagctgcgccctgacccttggggacgctggtcgcttcacctctcccgttcctctcccctactccttcctcttctccctgtggtcccctctgcctttctccatggcttctcaggcaccggacaaaaggcagcgcctctggcgctcccggggctccgaaagcactcgagcttcgcgactgtggaactcaggggctcgcgatctccacggagggagggttttactttctgccggcagrgcggccttgargcttgggttacagtgggctcgggttccggggcgggcctcaccgctccagggcttygcaacgggtgccccggcccttccccccccgcccaccaggcttctccctgggctgcakgaggggtttctgcggcgcaggcgcaaggattgccgctgccggaggctgagcggctgcggcgctttgtaccggcgaaatctgcttgggagcagcgatctgtttggccagtggcaggcggatgctcctccccctgatacgcacgtggtcttgtcycttgctgtaggggctttctgctcagatctccagactgaccccagggaacgccctggtacggggaacctaggacttaacaactccaaggaagggagtgtaggagttggggagggacagtgtccccatctgcaayttccggtcattgacagggattttaggccccgctgagagccagggatgcatgaatgcgtggagggaaatgagttgtaaacagagtgtaggggaacctggcatctccatgctgctttgctgcagctaatatgttttgcacccggggtacatcattttacctctgtaagcctcaatttcctgtctgtaaaatgggaaaattatgcctagtgttcctgggatactgagctggcttctctgtgaagctaaaacctcacctctattttaaggcccaggtgtctctggcctcctgccctggattaggggactggcccctggggtggtgaaggtcagggccccagcccccaaccacagtgctgggggagctgtaccaagcctaggccaccctcgctctggatggcaacttgaaagcagaaaagatgagtagtttcataggacctgtggggttggatttcgcatgcagaaaatgaacaacgaagtggtggacaaggttggtgttttattctgcctgggaacttggggcacctgtccagtgaggttggggcttgctggggctcccccttttcctccatcttctttcatcttttcccctctgctgttacggaccttgtcaagctgtgacctggcttcctgcccacctccctctggagcaacatctggatcatggactccggggctggtgtccacagtgctgggaggcaggagcaccctagtcctcctcctgacccccagcttgtccccagggctgtggagaccttggtgccagtggcccagccctccaaacacctgctgtcttggaggcaattctrtggggtgacctggtggccccagtgtcaggctgctgtgtgatgagggagctgctgttggagtagaacaggtcagcattaattaaggccgtacccttctgtccctgctgttccctctgccagttagggggctccaccttagaggcccccagggagggctggttcaatgctaggatggagagggtggcagggagaggcttcgtggtggggaaggcattggagatgggtctaggggagtggacaggcttttgtctggggtagactattcagggagagggtacagcgtgaataaaggcttggggtccgagatggaaaaagtgcttggtgcattcagggagaggcactcgggaaggataaacggaggctatggaaggagaggcaagaggggagcggtccttgggcgcgatcctggagggacaagaacgttcccagcagcttgggccgatccttggcccccgtcccacactccctccccccacacccccgcagatgttccggggaggcctccagacgcgcggccacacacctgtggcgccgcccgcgggccctgaccgcgccgtctttttcttttaaaggagccctgaaaaccatactctctggatcgcgagagcgaggccagggcccgccaagggcgtgtgcgcagggcgggggtcggcggggctgggcgggtggggggcggggggcggggtgggagatcggaagggaagcgcttcctggttcgagccgagaggggcgaatccggcttcgctccgcgccgccgggaggagctgtctgcagccccctcctcccgccctcgcctctccctcctccttctcccgccctcctcgccgatccgggcggtgctggcagccggagcggcggcgggcgggccgagcagccggggcagccgcgcgtgggcatccacgggcgccgagcctccgtccgtgtctctatccctcccgggcctttgtcagcgcgcccgctgggagcggggccgagagcgccggttccagtcagacagccccgcaggtcagcggccgggccgagggcgccagagggggccatgtcgtaccagggcaagaagagcatcccgcacatcacggtaagcggcccccgcccccgccgccccgcgctggcctttgtgggctgggagtgggcgcccggcagggtccagatccacggggcgccggcaggggcgccccccgaggcctcctgcgtcgccgcgggtggggcggggccggtctcgggatttcagccccctcccccagcctctggggacaatgggggtgggggagccccgcatggcggggcggggctggagccgggagtccctctccccgcgggcttgccgccccctccccccacgggatgtgccagaggatggcgtggacagggaggatgcggagccgaacaaaagagggaggggcaggggtccgaaccccctccccgcaggcctcgcgcgggggtgggagggtgagctgagcctccttggctcggcccccgcaccgtccggcccatgcaccccacagcccggtacctcccccgctggaggagggaaaaagatcawccagcgctccccactccccgcctttactgatggagtggaagtccggacctagggacagcgccatgatggaagctcggtccacccctccccgcagctaaaaataacctaatggggcgacgctggcggctgcggcccgggaagggttaatgttcccgacgctgggccgcgagagggtggggacggtggtggaggcagaacagccgggctgcgtccctgggtgtggccggaaacaaaggaayccccgtctttacgctttgtctcggggtggggagctgagggcgcagcggtcaggagctggccctccgccccagttcctgcctggcatcagcgtggagcctgactgttcctgagggatgcggaccactggagyccatgtatgcaggagcagcccggggccgggaggcgggattctgggcgtggtggaatcctccagggtgactccagaggtttgactactggagacccagcctgctcatttatgcaaaattcaggctcctggacagtcgcagggcacctgccagagggcagccttaggtaggcggaggtattgacacttgcactcacctgccagtggcctgtcccgtgtattgcaggcctgtttctttaaatggtggcagcaaggctttgcgggtggcattacccacgtaaagctccctgaggctagagcatgggctgagggcttccaccacaggaaggtcaggagggaacccaggccccctgcctcccctgcactgtcctgcatccgccccagctctgggctgagtcttgagttagaaaattcctcctgggcccagcctcagctcttgtcagcaggcctctgccaagcccccatccagagggtgggcaccacctcttctccgtctctcagctctgccctctgagacgcagaggtgtaagcggcccattcgtaaacactagttggtcaagaatcactagaacacatatggttgcttcctcctgggcaatgtgagaagaaggcaggtgatatttgaacaagtccctgccttgggaccctctaaccctgcctcccaagggaactgaggcaggtgatggggtcggggtgatgcagtgactcaggagtcaggagttctgggtttgaggctgtgtgcccacagaaggtctctgctgctctcaggtccccagtctccaaggtggaaacttaataggatggcctgcaaggcaggtctgtgggatgctgcctctgaaagtgtgcagtcccagtctgctaagctgaagtggtcaccaggcctactgcctgttgccctctggagtggagatgcctaggcttttccagccratggagctgggtgtctgatgcctctctgaacctcagtgctctgctgtacgatgtaggccccttcacaggactcctgaacatcctaggtgaccctccaaagcatttagtgtgctaggtgcatggtaagggcttcagatctgccgacaggtcttgctgctttagttcttcctgtgaaacaattagtcaacttgtgtgtaaagagaaatcaaatgggtggttccagcagcctctaaaggtggtttcaatgagcatgggaaggagagaggctgtaagttatgcttagttcctgggaaagagggccttgatgaggatcatttgtgttcatttggcccacatcagccagaagcgtttgtggttttaaacaaatcaaaaccttcagcaaatcagagaggatccacttgaatggggcttcactgtataggacctttcatcttcctgagtaccttttgctaataacacacatacacgtgttgtgacaggaaccagatccctgccttaaatgccatgtaacaaatgggtgagcactgtggcttttcaaatggctgcaccttaacgtgttccatagtagtcatttgacaagttaaggcaaacccattggctgttagtgggtttgcattaacttgtcaaatgactgccataccaagcacagtgctgggtgccaggaagagtgggaaggagatgaatgggtttgccctggcccttctagagcttagccaaggctgacatttcagcctgaagtgttagtgaagtgtwaagggtatcatacggcggggcggargaaaccccagcagggacactcagcctkgtcctaggggagacagaggggacaggaggagagcagggttctttgtggagcccatgggkccccagaggtaaaggagttggcatgctggagaaactgaaggaaagacggcctcgggagagcccaccctctgcttcccagggcaaccgctgcacagttagatcaaatcatgaaggcagttgagatgtttctgacagccatggtgtgtggcctgtggagagacctgggggcttggaaaggatcaagtgtggttcatgggaagaagtgctggtgtagcaggcatagctctcagcttcatccccaggtccccacctgcttgttgctgggtcatcctgtgcccctctgagcctcagctgtctcatctgcacagtggggataagggtgtagctttgccaatgagttcagagcctggagaggtgggagctagagtgggggaggtgaaggggcatcacaggcaggggcgcagcatgggcaaaggcaaggaggctgatcgttctgctcatgttgacgatgatggtggtgtcttcctcttttttccatcttggcctttttctgagacaatatagtagccggttagagacggaagagcaaaaaagcagaaacacttagctcctgcccccaaggactgtgtgaaatatttataaagctctctttcatgcgtgtcttttttttttttttttaatgaatggcacacttggggattaacttagctgaagcggcttcttgtgcccactgcagtgagtagagcatcctgggtgtggctctgagcaaacaaaggcacatggcttcctagccctgcagaagctgttggctctgaatagagctaccgaagtggggaggcctgctcagttgtgagaggagtaaagagtgtccaccatgatgatgacggggtattattaaaaatgaagcttcatgagtaccgatcacatgtgtttttgctctagtccaagcattcggcacaattgccattatctctcacctagttctatgcacagaactgtgagaaaggcagcctaggtagatcacccctctttcccaaagagtaaactgaggctcagagagattcagaggcttgtaaaggttcttcattggccagtggaggaaggagagcttrcattcaagcagggaggataggtgggctggtctgcgtgctaggaaaaccactgcccgtgtgtgtgtgtgtgtgtgtgtgcatgcatagttgtgtgtgtgagtgccagtgtgtatgtaaatgtaagtgtatgtctgtggtgtgtaaatgtgtttgtgtgtgggtgtgggtgtgtgtgtgtgtgtttgattaaacagtgaagatgatcaggaaagaaggatcaagtaaaaatcacatcaggctcgatttgttgctctaatttgcaagtatgcaaaaaatgtgtgaggcctattatgctttttcccaagggtgacattcagcctatctatggatatccagttgattccctgcctttttacacaaaggatttgagatgtccacagtgatttgtcatgcatatggtgaaatcagatggaagtcgaatagcaggactgaggatcaaggaaggacagaacaaatgtgccagtgattaggacactggagtggccatgattagtcatccactactgactctgagcatctgtcatctagggcagagaagcaaacaccctccatgatgtcaaggtcatgatcagagaggaagaagtggaccatttttagggaaaacattattttgtttaaatcaaattcttaaaaatgtctcagaggggacataaaagtgaaagtgacrtaactataccaccttaaccgtgaatgcccatttcttctaataaacatggccaagactgaatacatggagcacacacaatacaacatacatgagtgtgcatggcacatagtaaatatctaacaggtcatagctctgttctgaaaactcaggctgtgtctttgaggaaatgaaaattcagaatggtagctaaccagcaggtgtggtgggcaagcatgtgtgtgtgtgtgtgtgtgtgtgtgtgtgtgkccctgaccttaattatcttgccatctaagtgacaaagtgcatgcacataaaacaacttaagaaagactaaagggtgcctgtaatcccagcactttgggaggccaaggtgggcagatcacttaaggtcaagagtttgagaccagcctggccaacatggtgaaaccctgtctctactaaaaatacaaaaattagccaggcatggtggcgggcacctgtaatcccagctattcgggaggctgaggcaggagaaattgcttgaacctgggaggcagaggttgcagtgagctgagatcatgccactgcacttcagcctgggcgacagaatgagactctctcaaaaaaaaaagaagaaagaaagagaaagatagaaagacaggaagggagggagggaggaaggaaggaaggaaggaaagatggaaggaaggaaggaaagcaggcaggctgcggaacagggcacaggtgtcagaggaattcagagaagagatgactcagccctggcagaagcaacaagagatggcttcttggggtttggaggatgacatcagccaggtgttgagggacttgattggttgagggaagggaagggcatgcaaggtgggtggaatatttcacacaggtgaatcagaggacgcagaagtggaaatacatgtgaatgggtggggctatggggggattctataaagctttggaaatcagggagaatgcacccaaggggatggaaataacacgtgggttctaagtgtgtcttagatatgaatgggttatttgatgttgagcaagtcactttctctccctgggcctcggattccttttctggacagggagagttggattagataattcagttccaagttctaggccactctgatcttcttctttggttaataggaaggcactggaagttcttgaggtaagatgctgttattatgaaagcagcttgtaggaatgtggattctgaactcagactatctggctttgaatcctggctgttttacttactagctatgtaattggacaagtcacttattctttctatgcatcaattttatctgtacagatttatgtttggaaatcagaatgatatttcctaagattttttccccatagaattaaatgacttaatatgtgtaagatgcttaaaatagtgcctgcacatattaaatgcaatgtggattagctcttattattattaccgtgggatggtgtattagctttgctccatagcatacaaccccaaggtgtcaacaatatacacttattttttgctcatgctacatgagggctgtgggttggctgtaactttgcccctgtttactggtgggtagtgagtctactctgtgcatctcctcactttgagacccaggctgaaggagaagaaaagcacaagagattggcagcaacctgaaatatctttaagaacttctactcaaatgtagcatatttcacatctgctgatagtgtactggccaaagcaagttgtatgatcaagctctaaatcggtgggagagaagcacaaagtcagtctttctagaggagatgtgaggattgaatgtgaaagttctgacatgtaaaagatgctaatacacacccgtggaagctgatratgaggtggtcaggaagcacagsgattgggtttggaagaaaaatcccaccattggttcttaggttgtattggatttggtagcaagctcgaaattgaggtgtctcaatggacartaaggaatagattggaatgagggtgagaggcaaaggacagagatagatattaggggcccatgtacaaaaggtattggtagaagacagaaaaatgcaagctatttcaacaaccagtggttctcagcctgtgtgctgtgagcacagtggtgtactcaaaaaaattctctgccgatgtgtggctaaattttgatcagcgtttaaaatttatgtttgctacaaccaagtctacaaattattgtagcatctctcaggtggagccctgagtattcacaagcagagagatgttgaatagagtctaatttgctgtaagtaaaagtcagctcttgccatggaagaggaacaccggaggactttgccgtgagagcatataaaagaacatggtcggggcagtggacagcaccacggtgctgaatggtaaccaagtgcaatcagagctatgatagacctgtaagacagctacagtcacactgcagtgggagggcatggtgatggttgcagacttacctggtgtaattttaggtctttaatccttcaagaatgctgcaaaattttatatgatttgaaagtatgtcctgagtacagtaaggttgagaaccattgccctagagagctgtaatgaccaaatcatagctttgctctgagaagaaacaactctgaattggtgttggtagtttgggaagtggagtgggatcttggatgcttcatagagaagttgtctagaaaacaagagcaagcagctaaaaggaagaaagcaatgtttgtggatatatgaggttgtagttccccactccttccttgggcctgtgtcccaggcatccagagcattygccttgacctggcacaccatgtgtggccctctgcctttgtatcagctgtgtccattctctataaaggattcctcctcctgggctgggggtggtgagcacttcaatttcagtaactttggcttgttgctcatgtccatctgctccgcttgaccatggatacttggaagactgggaaattgtctgattctcctcaggagcccttcaggaacactggggattcacagtggggatgccacactgtgtgagtgagtgaatgggagcaagattgtggacttccttgctgagtgaggtttcagccacagctgcatttagtcttccttaacaaggcactgtctgtggatttaacatgaaggtagttactatgcagaatgagatgaaggtggcatgaggagttttggagctcaaagcgaaaagaaggtgtgggggcccctgaagtggtgctttgacaatggggagagggcagatctggtttagtaatgggcttcgctgcatttcacatggaatgggaagcttttgcaaaaggtactttttacacacaagtgggatcgtcacattgcacatcttgtgctctgcccagggccttgagtaaataatgacctggtgttggaacttggagtcaattccatgggaagactcattggatctgatgcagaattacatacagcaaaaaggtggctatttgaggaaattttgaacctgcccccaaattatgttgccatgtatttttaaatcataccatatccatagacccttagggcttaagrtctaataaaatctcagcaaatgtttgatttctataacctcaacgttgaatsgaacttttaaattatgtaaaattttatgttgtacaattaaggaggaaggaaaaagtgtctgtctactgcttctcccctgcccccaccattctcccctcagtgcagaaattcccagtatgttctctgcatacctccaatgacagggagatcaccactttacatggcaacctgctttactcttgtacagctctgttgttggaaggctcttctttatgtagagtgggattctgccttgtgccttacttttgttctcaagagtctccccaagtttcttcttccacactgctattcctagaggcactggaagatgtttctccattacttaggaccttctcttttccaaaaccactccaattctttattcctcctctatcatgatttccgcatacggtgttaggttttcctttactttctttcattttcctttcctttcgtctcatttttttttttgctatattttatttctgaacatgcagaataaaaaggaatccaaataaaactttaattactgggaacctcttaaacgagtttaaaggcttcctaaggccatcaactcctctgagaagctgataaaagcaattgaagctttttcctgcatcctcaaatgsatgaacatttggcatagaatgttagagcatttggcatagaatgttaaacttcataggacagtgttcagtgtattgggtgcttttacatattatttcaagtaatcttgtgaggtaggtattttgatgggttccatttatagatgaggaaactgaagccaacagagattaagtatcttgccaaagatcaccccgctaagaagctatgtgggaataagctgccatctctggtgccaaggatttcagtctcatgggggaaataagatatattacaatgagctggaaaatgagtgtcatgaacaaatgctggaccagagatgcaagcctcatgttgtgggaactccaaggagtgaccttgtgatcctggactcaagacactgcacgtgactaaggagttggaaagcaatgagcagagcagatgtggccagagatgcatgctgcagggaggccatagaggaaggcacaggttgtgaaggtgcagttagggaggcagagcgtggtgtgcgtagatagatgtggtggggcgcggccgagagagggccgggctcaggccgggaagagcctaggaggtgagctttgtcctacagatgaggacaagctggtgaaggattttgaggagaagcgaggcatggttggatttgcatttcagaaaggtcactctgcctgtcatatggagtggacaagttctgtggcagggagatggggtgagggcttatctggggcaggtgcattgggaggtgaaagtcagcaggtaggtattagaacagttccagagtagatgcaacaagatctaaaaaagagttaggtttgaggtgggacagatgagagataagctgaaaatggaactgagcattttaatgagatgttaccccacgttgcaaggattaaaaaaaaaaataaggcactgtgcgaagtgctatccgtgggttaattcatttcacattcaaaattttcctctgcatttgatgagaaacagaagcacagagaggtgaactcacccatgtgacagagtttggaggtgtggggccacgttagagcctaggtagtctgccctctgcacccatatcgttaggtgcagtctggcctctgcattcatatccaaacatcgcctctttgttaaatgagcatgtaatgagagagtaaatataagcacctggctcccaggaggcattggcaatgtttattagatgacaggtctctgcatgtaatgtatttcccctagaaagccttttgcagttttccgaggcctttaatctgccttaaccacttttgaccacattcacgataatcgtgtcaagagggcaggtgaggtgcaaggcctggggtatgtacttgataaacactgagcagataagtgtagtctatcactgcctgtccctattttacagagtggggaactgaggctcagatgtatcaactaggtacactgaagagaacactgtactagtctcaccaccgagaggcagtggggtggtctctgtataggtgccaggtggaattcggttcaaatcctagctgctgtaccatctcttggctgtgtgaccttgagcaaattacttctgagtttcctcacttgtcatacttattcccacttttaaggtgatttaagaattaaaaatgaaaacccatgtaatgcagaactgatccttaatatgagctcaaggaatgtgcacttcttaaggcaaaggagttctgttcggatttctttctataaagcaagaagcacagaccagaacacagagaaatgggtcaagttaccgatcacacatgcagctagcatcgtctttccctatgcagcgtgcaggccctgcccactcttagggttgtgacagaggtgtgctgttttaaaatcagatattcagtccatcagggagtgctccctgaaagtctgctggtacagtgggacctgaaattgtgcacttataactgcagttgtcatggaaacaggcataatatcggggggaaaaaaagtcctgcagtccatggggactacctgtatctcccattcatgaaagggggaaagccgccctgtcccctacccgtgagagggggaacgaatgtgtgttaattagattcaggctcataccggttgccacttcgtgggttgcattcctggatagtgtggcaaagggccactggctgacaggctgtcgtccccggaggcaaaatcaaaggcaaatggatggtttctgtgaataaatatgagtgtgyagctggatgggatggcagcacttgccgttgcaaggaggccagagtggggagcttgctcaaggggaaggctctggttattcaaggtrgggaccaagtcatggaagtttgacgtatttgagctataaaacctcttatgcagcaacccctgtggctcccagcacagaacctttacgatgtattaatttgctttgatgcgatgatgctgcctaacaaacaccccctctagactctgtgccttacagcaaccaatatttatttatggcaataggtttgtgggtggtagatgcttagcagggctcaactcaatttgtcttcagtcttctgttggggtcaggtgtgctcctcaaatcctctcattctggggctgccactccttgggtcctgtggttttcatggcaggaggtggactgtcagggaaagctgaacccatctgccccttaaagcttgtgctcagactggtgcactcccagccaaagcaggtcacatgggcagaacacccacagtcagtggggcaggcggctgcactgcacccactttggggcatggtgaggacttgccacagagggtctgtgttgaaattatctggggatgtttgttaataatataaattcctggcttgtaatctagatctggtgaaygaatatcttgataaaagccccgatgggaatttttagcaggcaattccagggcattctgaggaccagctgggccatgctgtcgtgctatcagttttcagaaggagggtggtggggggatatgcctaccgatcatcttgaagttttgaattgcgaatatcagcttcaacatcatgagtatgtggcctttaaaggactaaaaactttcaaaacccaccttgacatttcctttgttctaaaagaaagcagttccccctgcattcaatgcttggataagcacatttctacaaaatgggctcccttgatctttttgaggctcatttccctgcttgctctttggaaagaaagggtttcttcatctttccagaagagactggtcagttagttaccctgagctttcctgcccttcccactgaggaatcaggtaacctcatctgaatttgcgtggcctctgagaccctatgttgacacccacctcttcgtgattgcaatgactgctctartgggggccatgggagttgcttgccctcaccccaacttcctggggtgggagaattaagtattggaagtagtgtaaggtcttcatctaccaacactgaaatgtacttgccaactatgtccactcggaaacataagtcatgattattttgactctgcaaggccaaaagaagaagttttgaaacaaaacttttttttttttttgagatggagtctcactctgtcacccaggctagagtgcagtgacgtgatctcggctcactgcaagctttgcctcccgggctcatgccattttcctgcctcagcctcccaagtagctgggactacaggcgcctgccaccatgctcggctaattttttgtattttttagtagagacggggtttcactgtgttagccaggatggtcttgatctcctgacctcatgatccacccgcttcggcctcccaaagtgctgggattacaggtgtgagccaccgcgcctggctgaaacaagactttttttaagaagctgagaaagaaaagcagtaagaaactataaggttggatgtggtagggggctgaggggtcttcagcatcagggtttggagaaaactcacggtctctgtgtccagtgtcaattcaggaccgcggacagcaccaacccccacctgttcctcacctacccacagtacctggaactttcagaagaccgtgtctctgtatctaatgtttatttggctggaatgtttcccttctcctctcccaatttttctagacttctgaactcctatttatattgtggaactcagctcaaatttcccctccttgatgacatagtcacagtcttttctctgtcaccgtaataacagctttggttctctgctatttttcagatagccaaggttgctaaaccagtgatttttggatagaggttgattggataagaatagcatcccatctcttttttttttttttttctaaaatctagaccttaatagattttgtatgccttctgacatccaccttcatggtggagatgacagatttattcccaccatgcaggagggagaacagaacccrgggaggtttaatgcctcactcaggaatagacagtgatgcagaacattcactgtcatccagaacctcccctctgagctgaggctgactgtggttgctgctgtttgtttttttgttctgtggataaaaatgcctgaagctttaaaggctagtttttgtaagcagagctcaayctaatgcttaatgtttgtgaaaaagaacaaaagcgtcctgccaatgtcagctgtctcctcccagtgggggctggatgggagatgacagtaggtttggagaagaatccctttctcttgcctggctgctcctctgactcatgagacatttggcagtagagacaggaatgcagcccagcagggttttggtagagtcttcgcgaggacgccttcctgcagcatctgtagcgtgcaggctttgcacttgccaggcttctctctcagctagtggggttaggttttcaggaatttgaaaagcagaaaagagagatttattatgtgtccatgtattcttttctccctttgtttctctcttctctcctttctttcctcctccttccatctttcctttcctctttatccttcttttatctcttcttccttttctctcctttgcactccctctctcttttcaaacgttctctttcttctttctctgtctctccttgcctcttgtctgttgcctccctcttcccctcctgcccagcaaacatctgctaaatactgtgtaagggtcctggctggttcctgaggatatagagatgaaatacgcagaactcccctggccatgaaggggtatccagctcaatgagagatgggcacatgaactgtgaccattgggggaaggttgtgcattgggagacagctgtgcattatactggcggttagatcatgggtgtggaccccaaagtctccgtaggggaagccaatgactccagatccacttcattttgaattcctaacaaagaattttgtagtttgctttttctcctcacattttattatctagcacttttgttcgtgcttaaaacttcctggaagatatttgagtagctgtagtagctgaatgatacttcattattggtgtggttataccattgtaattaattctggatcgcatctttgtgtatcattttgtgaccctgttttggatattttctagaggacaaattcccagcactaaatttatgggtcaaaggacatgaacattgttaaggcctttgatacctgttgcaaacttgcctgctacacattcttactgaggaatcccagctttgaggagaagataaagacgattccttccccttcttccatttccacccagcgctcatgtgatgtcttagcttggaaatgtttctatcttccggttcctccctgatgaaaacccctccatgaccttcaccacagagcccagactcccctttacacatggcactggggtccctgagatctggcttctgcagtcctttccagattccccactttgaggtcacccttcagccaaagaagaccacttacagatccccaggcatgccaggctgcttctgacctctgtgtctttccccatggaatatggtctggatctctgtccccacccaaatctcaagttgaattgtagtgcccagtattggaggtggggtctggagggaggtgattgaatcactggggcggatttccccctttggtgctgttcttgtgatagtgagtgagttctgaggagatctggttatttaaaattctggtacctccccactctctctcttcttcctgtgaggtgctcaccccccaccccccactttgccttcagccatgattgtaagtttcctgaggcctccccagaagccaagcagatgccagcatcatgcttcctgtacagcctgcagaatcatgagccaattaaacctcttttcttttcttcacaaattacccagtctcaggcatttctttatggcattgtgaggatggactaatacaccgtgtgcttccctctctcaggatcccttttcgcctttgctgtgtggctaatacctactcatcctctaagcttagagggaatgcttttccccttagcagggttgatgtggaggctgcctccatgctctgtggccctctgcatttcccacactggcagcaaaggccagcagttgacttagcctccctcactggcctgagcaccccttgagggcacaagctgcatttaagctgcttacacccatccttaaacaatgatttatagagtggagttctagccacagaaaatggcagagaatgaacaatgagctcttcacctgccaggcctgggctgagtaagcacttcaaatacatgcctaggacgcagagccaattatccccatctcatagacaaggaaactgaggctcggtaagtcacatggataataagtgaagtcaggatccaagcccacctctgtctgagtgtggacgttttgcttttaagcggtgctgacacaagaacatgatttgctctaaaggtcattgctgtcgctgtggaacgaactgtatctctgacatgccctagctaatcaattcagctgttagactttggctgagtttttcatgagatgctttatttcttcaaggtttatacataataattgttttttgagatggagtctcgctctgttgcccaggctggactgcagcggtgcgatctcagctcactgcaacctccgcctcctgggttcaagtgattctcctgcctcagcctcccgagtagctgggattacaggtgcctgccaccacgcccaactaatttttgcatttttagtagagacggggtttcaccatgttggccaggctggtctcaaactcctaacctcaggtgatccgccaacctcggcctcccaaagtgctgggattacaggcgtgagccaccgcacctggcctaggttatacataataatgtttgtgcagagcgtaccattgttcacatctgctgttttcccctcacagtaaccccgtgagaggcaatagacggcaccggtattatttttttttataaatatgtgaatttggtgttattaattttaaaaacatatattatgtaacatttacttttttagtatacagttctgtgcactcatatttcctgcatgagaaaggcagccttagaaggcaaggcccgttgatcttattacttgggtgggggagggttctaagttctatcttcttatgaggtgtcatggattctagagtttgggaatgtttaaacatgggacagaagcatggcttggtggctggaatgctggacaggccattaggaacccttggctctagcctgcatccttactggttgtgtgaacctggaggtcacacctgttcgtggacctcatttccctgcgaggtgggatcagacctaacattccacayggaccattctgtgcaaatggtcacaaagcacgtaacttcaaagcccatttcctacggtctcttctgtgggaaagtatcccttcagattttccacaccacaaagggacctgagtttggaaaagatatcaactcaattctcctcttgagtattcgtatcaaatatcagcagaggcaaggatctgaaaagttctgtcataaagacatcattgcttctgcttaacccagagatttctttttttttcttttttttggtgggcggggagcggggaatctcactctgttgcccaggctggagtgcagtggtgcgatctcggctcactrcaacctccttctcccttgttcatgccattctcctgcctcagcctcctgagtagctgggaccacaggcgtgcgccaccacgcccggctaattttttgtatttttagtacagacggggtttcaccatgttagccaggatggtcttgatctcctgacctcgtgatccgcccacctcagcctcccaaagtgctgggattacaggtgtgagccaccgcacccagccttaacctagagatttctaaactcacggcaccgggtaacccctgtctgggcctgtacctactaaaatctctctgagcttgagttctgaagcacatggctttgaaaatgcctgtttaagaggcaaaggaactacwaattttaagaaagaacatgaagaggttgaatcagtgcttggcttcctgtgggcttattttttcagaagtagaccagcacctgagagacactaagggcttggagcctgggcgcccctgcttgcagtgtctattggtagttggggagggagtggatttgaacatgagctccaccatctgattctaggaaaagcatagcaggttgggccaatcttctggcacacagtgcattaaaataccacctttcgggctgagcccgaaaagccccctattaatagtgacaagacagacgggtgcctgcggggcggccgtgttccggaagccatgcaccagctgctggtgacttatgtttcctgttctggagccggggaaacatgcacgccagcttgtgggtgcttcctggacgtgcagagcctgggcctctttttcccattggtcccggattgccgtcaagaggcttggtgagtttcctctctggggatgcacacatcttttttagcggtacagataggttgtggggcctaggagcaacttaccttgaaacatcttcctccagagaccctcctgctgaagaacgggatgtgcctcttcacactggtcttcctcggctcacagctgtgatgcctttctctccatcttcacccattcatctgtcaagaatcagttcagtcacccaggcagccagccaggctgtgtccaagatgccggagagacagcagtgaagaaaacggacaaagtccgttgcctccgtggagctcacggtctagtaaagacaagtgctgtgcaaactccaggcagtgccgtccccaccaacgcctgtgtcatgcgtcccctggggagttgtgtcctgcactgccagtggggtaacacaccaaagctgtgattccagtgtggcaagttacattttagacagacctagaaatacatagcctgccagatgtgccgtaaatactgtgaatacataaacgggtaagggatgtagggccagctggcagggtggtggtgtgtgttgtcccaaacaggggaagtcgagcggagggcactcagataagtaacatcaagcagggcccaaagcaagtaggagcaggaagactgccaggaacctgggactccagattaactggggtctcgctgaccttggctttcactctgagggaagtatgattctgatgcaagaagctttgagcagccgactgcatgatgtgtttctgatgccttagtttgggttaaactcttcttctctgggcttgcagggccattgtggctgatgccataagaccatgggacctggtccaggggaccactgaagtgccttctgtgcacttcctcagatggccttggcaagatcaagctctggttgcccacagtgctagccaggtcaatatgcactctttattggattcatttattgaacaggataccctccctccagaccctggaaccacctcccagatgtaccacctgcctccaggttcttgagttaggctctgmtgtcagagcaccacctactgtgggttgttcttgtcagtttacttcttttctttttcttttttttttttttttttttgacggagtcttgctctgttgcccaggctggagtgcagtggcgctatctcggctcactgcaagctctgcgttccgggttcatgacattctcctgcctcagcctcctgagtagctgggactacaggcgtctgccaccacacctggctaattttttttgtatttttagtagagatggcgtttcaccgtgttagccaggatggtctcgatctcctgacctcgtgatccacctgcctcggcctcccaaagtgctgggattacaggcataagccaccacacctggcccagtttacttctttctcccccacccaagggatgggcttcagggcagacactgtgtcttcttcgtcaccacatctccagcctggagagaatacaaatggtaaaataagcacatggaaaaaaattacaagccttcaagaagtggaaaattgccaaggcacggtggctcacacctgtaatcccggtgctttgggaaaccgaggagggaggattgcttgaggccaggggctcaagaccagtctgggcaacacactgagaccccatctctacaaaaaaaatttaaattagccaggtgtggtggcacattgcctatagtctcaaatattcgggagtctgaggctggaggatcacttaagctcaggaatttgaggatgcagtgagctatgatcatgccacttcactccagcctgggtgatagagtaagactctgtcttgaaaaaaagaaaaaagaaaaggaacacaaattaacaaacattaataataaacaagagtgcttagtgttttcgtgcaaagaatggggcattccttttggaaagcagtttggtcatctttatcaagggctgtaaataaggtttatgttgtttgacccagttgttaagcttctgagaactttgcctaacaaatcattcaaaccaaggaaggagttttgtgcacaaaaaagttcattgcagcaaaatacgtatcactgtacaaaacagaaaatcacttcagtaaccaacaatgggggaaatattaaacaatttattatgtatccctaagatggagtattttgtgattattttaaaagtatagtcatgaagtgaggccaggcgcggtggctcacgcctgtaatcccagcactttgggaggccaaggcaggcagatcatgaggtcgggagattgagaccatcctggctaacaaggtgaaaccccgtctctactaaaaatacaaaaaattagccaagtgtggtggcaggtacctgtagttccagctactcaggaggctgaggcaggagaatggtgtgaacccaggaggcggaggttgcagtaagctgaaatcgtgccactgcactccagcctgggtgacagagtgagactccgtctcaaaaaaaaaaattatgtatatatatatatatatatatatatatatatatatatatagatatatagtcatgaagaatgtgcggcaagttgggatgtgcttatggtaaaatgcagaaaggacagaactgtgttctttttggttcccataatgttctggtttctgacttgcatatcatttcctctgcccggaacactccatatggtgaagctttgtttatgtttatgcataaacatgtttgtggctgagttccattctggaatggtattgacaaatagaagagggttgaaagcctagtctgtgcccttaggataggctgagggattgaaaacatcccttggagaacatcatctgaatacatgaatgtttacgtagacatactcatacaatcctgtgtgtgtgtgtgtgtgtgtttatctatccaccttcctctaatgacacatccatttatctatctatagtcatacagagtgtagatataggaagtataaatagactcttttttagacttattttctgggtctgcgctttctctgcccaatgccccagataaggttggcagcccctttggttggcttccatggcaggtccccacttttctcctcctcctcaaccccacataccccatgacttgataaacatctgtctctccatctgtcaaccccctgaaagcagattccagctctgtgcctggtcccctctggagctgagagcatcagtcggtagctgatcggtgcttggatgagtgagtggatgtgtgcactgtgggggaagaaaacaggaaaaagagtggggagacatcagaatgtcaactgggagttgtactggaaaaatggggttttctttttttagtctcttcactatctttttaaatgtctctaagttgatcattatcatatttaataataccttgataactccctgttctacaaatgacccaatttcttcaacaaacgaatgacattgaaaagggaggaggggccagtgcagatgctgacagaggctgccgagatgatgaggcaggtgtgctgtggggcctggtatggctgttggttcaaaccttccaactacaaaaagacgtctatgagaccatcaaggcacattgaagagggcctgattattgactgataagcaaggtattaagttaattgagttcgttgggataatggattctggttttgtttctttaaaaagtccttacccctttcctgtttagaaaaaaaagtgcagcttgctgcccatactcatttctcggggcaaacgggaaatgggttaacagtgagagagatctagtgaagtatttataggtggaaagatacagtgcttgtgctttgttttaaaacacctcagcaaaaacaaaacaaagtgagaggggagaaaggtgaaaggagaataggaagtattggatagagaagtattgaagctggtgatggatctggggcgggggaagttaaatgcctttacttttgaaaatatttgataattcttatattaaaaattaaaaagaaaaaactttatcctggcttttcaccaaggatccttaatactttgccttgctttgcagagtgaccgactcctcatcaaaggtggacggatcatcaacgatgaccaatccctttatgctgacgtctacctggaggatggacttatcaagtgggttgatcaaaacggaccttttaagaaacctgtgtcgccaggctgcctggccttagatggaacagaaggctggcattctgtcctagaatgacggggctgtgtacctgtgtttcaggggtagagacctcacagaggttgggggaggtgcacactgcgggtggagaaggggctggcatttcttgggtgcccccccgggctaggctccctgccacacggctgaggcagctcctctcttgcaatgctcacacaaaggctgcaaaatgcagacacgtttcctgttttgtggttttggaggcggcaggccaatgagtctgggtacctggccccatatgacggggtgagttagggtcaaggcccggattccaccctaagacaactgaattcacagctctttcttccacctacccacagtttctggaattgggttgaggagagcagggaggaaggaggaatgtgtggcttccaagcccagccttggcacttaaagaaaagatagacattggggctggagtttccttccctttcttctcattggctccctcttcagccctgcttatgacaacccaggtgtcttagccagcgctggctgccggaatggaatgccacaggctgggtggcttaaacagcagaagtttatttctcatagttctggaggctggaagtcccggatcaagctgccgtcagggttggttcttcctgaggccttcctgaacttcttcctgaggttcttccttggcttgcagacaccaccttctggcttgcagacaccaccttctggctgtcctcacagggccctttctgtgtgtgtgtgtgcacactcctggggtctcttcttctaaggtcaccagttttgttggattccagccccactcctgtggcctcattcaaccttaacaaccttaatcacctccttaaaggccctgtcgctaaaggtagtcccatggggtgggctggggcttcaacatgaattttgggagatacaattcagtccataacgccaggcaggggtctgtaggcggcggccttcttttttttttttttttttgagacggagtctcactctgtcaccaggctggagtgcagtggcacaatctcggctcactgcaacctccacttcccgggttcaatcgactcccctgcctcagcctcccgagtagctaggactacaggcatgcatcaccatgccccgctacttttttgcattttagtagagacgggggtttcaccatgttggccaggatggtctcgatctcctgacctcgtgatccgctcgcctcggcctcccaaagtgctgggattacaggtgtgagccatcgcgcctggctggccttaacattttactggcgggtgaggatcagggcagttctctttctgtgagttgtaacctggatttgctgggtgctcagcctcttcccttgaaatctggaagagaagagaaggacactgtttaaggatccagcatgagtggctggcacaagaaggaaaggcagaggggaattggagcaaggggaaggcagaaagggattgatactgttaacaggatcatcctggggcccgtgtgggctttggagatgatgatggaggaggaggaggaggctgggggaaaggggctgtggagtattgggggcattgaaagggaccacatatgcaaatcacccagtgaagagggatacccagaacagttgagccctccctgcctccccccagcccaccccccaattctagtcccagactttgaccatttcaaatccagcccgggcctcccctcctctggcttcattccttgcttgctcttccagccataatgaaaacttgggactcacrggacttgccaggctgctgtcacctgagagccttgcacccatcagtcccctgcctggaacaccttttcccctgtccctctgccttcccctcatctcttatttgtccttgtgggccctgctcatgcgactcctcctccaggaagccttccttgaccccaagacggtgtggggtgcatccctctgtccccacagcacgtgagctgctgtctgttgcagccactgtcacactgcatcgctccttgaccagggccttgcctcgtggccccccgccctggggcccagcacctgtaggtcctggagcaccgattcagggaaagcgcaaacaaatgaatgctggccatcaggtggtgaggatgctcctgtcagcctcagggcacctggatcccgaatggtcaggaaggcagattgggggtggggaagggtgtcaggatgtgtcaaaaaatgaggttttctaactcaaccatggcttagatagagagaaagcaactctgagggaacacccctttgtgtgggggctctgggcttctgaagcctgaaaggtaaaatgaccctgagaatgatctcgtgggctcccccatcccacacaccacctgctgctagaagtttgatctgaccacacccacccccgtccttcctgggccaggcccccttatagagctccgcaatcccggagtatacagaaggagcaagtggccatgggttgagctgcattcattaagtgcctgctgttatgtgtcaacatcaagagtcctaggactccggctaaccaggctgttgaggaaaaatgcagtttccctaaattcattatctgtcagcccctcttggttgtaatccccttttacttgaacccgttgctgagaagytctctgcgtgttggcagtcctactccggacttgtgaagctgagtgagtgacggtgactgaggcctcacagggcccttgggtgtttattctgaacgtgcatcctgcaggctgagaagggtaggtgtggaagagccggggaccacctcgggtacagaggcacaattactttccttcacttgaatgaaaccccaagaatcctttaattctgtggccatttgccaagttttcttaagagccgttcagctgttgtgtgattcattgaattatgattcatcgaggtttccatttaactcactcagccttggtgaatctagtgccggtggttgagagtttcttctgcaccgggaggtgatggtgttgggggaggggcgtctgtctcattcactgagctgagcttcctctctcctccttccctttccagcacattgctattgagcgccattcactgagtccctctgattcactgggggtcccgtttagtgcaatccctgttcagggacagtctggctcctatataagggaagcagggcggcagtaaagcctgctggtcagagctctgatattaggcttggggagacctgggcttgaatctgggcccatcactgacttgctgtgtggccttggaggagtcactacacctctctgagttgtgctgtcctcttttgcaaaatgagaatacctcctaccttgcagggttgctgatgggagaccagagagagtttgttaagaggctatgattgtgcctggtaagaaagagcctctggctgcagagatggcattcactgttgaacatcaagcatcttaggactctggccaaccaggctgttcaggaaatgtcctgtttctttaaaaaaaaaaaaaaaggaaaaaaagaaaaaaggtcaggcatgtttgttcacacactttgggaagccaaggcaggaggactccttgagctcaggagttcaagattagcctgggcaacatagggagatcccatctctacaaaaaatttaaaaacaaaattacctgggcatggtggtgcaagcctgtgtagttccagctacttgagaggctgaggcgggaggatcgcttgagcccagcaagttgaggctgcagtgagccatgacctgtaccactgtactccagcctggctgacagagaccctatctccaaaataattaaaagaacctctcattagagtacttgttggcccccactgaatggtgactcggtcacaggcttgaatcagactgagctgtgattccgctgacactcacgtgtaggtccgtgcscatgtgtagacacaccacgtgcatgtctacagccagcggcccttctgcctggaccgtgcccaggcctttgcctgagatggcatttggggtgcgaccctgtcctctgttagagctggttgtgagccttcaatgagagaagccrtgatgcgcttagaagacgctgttctccagttgctgttccttttaagttaagggtcgagtgtcttcccaacccctttcccttcagctcttggcaagcccacacgtttggagaggatggcagaaggactggggaagaaaggatttccctaagtcaagttggacattctggtgttattattagtagtggtggtggacattctgggggtaagggattggttataagcagcggcggtggacattctgggggtaagggattggttattataagcaatggcagtggacattctgggggtaagggatcggttagtataagcagcggcagtggagattctggggataagggattggttattaaaagcagcggtggtggtgatcctggtggaggtggacatgtgtggtaacattttctgggtgtccaccttgtccctggcactatgcggtcctaggcttatttcctgggttaagaggacagtgtgtggcacccacttctttgggggagccccagctgggacctgcttgctggcccagcttctcacaggagcccaggagggcagaggctgctgtcttggctgcctggctgtggattctgtctagagctgcacttttggtcactgaagcagcatcttyctgtgtctttattactagggttttttgtgacttagaaaattaatatgctgcccaatctcaagcgttcacaacaattggattttttttagaataaaaatcacccacagtcagatctcatggtctgagccagaccttaaccttggatgctgcagggttcctttcctggttctggctgagcctcttcccccagcgccttgagggacctcctgactctggtgccagcaaataaaaaccagaagccaccgtcatcaataagtcacccatggagatccccgggggcttcgtttctcatttcgtaggctcttttccctccttccccatttggaatttaacctcctggaggaagttttcaggcacctgttacatcagaatagacatgacggtcagcacatgcatcatgctgggctcacttctgttggattcagctctgccaccccctccacctggaagccttcttagataatgagactggatgaaagggcccctcctcgtgcccccgatcatctctgctatactgggctctaacagtctgcccacctgtcttacgtcctattagactatgagccccttgagggcatgtgccctgcctgagttatctctgtctccccagggccttgtgaagggcctggctcagaaatgtttatttcatggaactgaagctgcgggttgactgcccattctacttttcctttaagaaccaaggctgtctctgttgtttgcctccagacaaataggagagaacttaatcgttcctggtggagtgaagaccattgaagccaacgggcggatggttattcccggaggtattgatgtcaacacgtacctgcagaagccctcccaggggatgactgcggctgatgacttcttccaagggaccagggcggcactggtgggcgggaccacgatgatcagtgagtgacactgtcccctgccttagggacatagactgtgaggtctcctycccatcaccagcatcacaagtgctcagtgtgttcgaggctctctgcccagggtgccattggatttcattctccccccagccctatgacacaggtcactgttttacagagcataccgtgtgtgccactggggccacagaagatggcttaataaacaatacggttttataggtaccaattttaaaaaattatttttaaaatattgaaataaaacaacatctcattgatataatcgcttagcatgagactgaagtcacatttagatttttagaaacaaaatttgtttaaagaaaagtattaagtaaagaagacatggattatagggagataaagcaaaaaaaaaaaaaatccttcaacatgatgtgaagatggctatggtttcagaaccagtgacataggtattattgtgacagatgggagaatagaggctcagagaggtgaagcaacttgcccaaggagacacagctgggaagtggttgtattagtattgctgcagtaatactgtgataacaccgcgtaacaaacagcccccaaatcttaagcaacacttgtttttctcatttgagggtgtgcaggagtgggagtggggctggagtggctgtgcttagctttgggttggattcaggcaccatgggtctcccattctggacccagtgactccccagccactctgttctcctggtggatggcagaatgcagggggttctggccgaaacttgcctttcttctcactgcctcatctcctcacttccatgctgcaacttccacccacattccattggccaaggtcagtcatgtggccgagcccaaagttgacaggagcacactgtgccacagagagccctggtgaggttggggagggaaggaaacactgcgggcagtgagaccactccccagcagtgctcggtctgggaaactggactcctcctccattgccctgtgcagcccgatggctgtttcttgtgttgattttgaagagccgcttttgcttggattcattttaataagcaattttaattaaataggccacagttkattgtaaatgttctttcaactgttaggctcttcggtttcaggaggcctgtctgtaagctggccccaaccctgcccatctctcccgctccttcacaaaggagtccctttggaagtgtggtctgtgggctgaagcccaccgccatgggcagagtttgccaagtccctgagccaggagggtggggctcgacttttgaggcaagcactgtcctgatccctcttccaaagggcagcccgtggatctgctggatgggaaatgggaggatctagacttggacttggatcccagtggccagggtttgaacctgagcactggcactcagcaggcaactgcatgactgtggccagcactcagcctctctgagcctcagcttcctcatctataatgtgggccttatggtgggaagtgcctagggtggtttggagacgtacatgagattccttcatgtagtgcatgggacrtgagagttctgagagatgggcatggaagttctgggttcaggaggactgcacagggcaggggaaggagtactggatgaggagccagggttcctgggatgtcccctgcttttctccattaccagctgtgagaccctggggagccctgccctgtaagccttatcctcctcacctgtgaagggcagtttccaaagtgtgtttcatggaacaagagcctatgaaagcacacgaggacaacagtccagggctctgaaagggtccccgcccttccccatcttcattcaacagatgttaagtaagagttgtcygcaccaggcactgtaccaggtgaacaaaagcaggaatgatgctcgttgtcaaggggactgccatctcttggggagtcactaatcgtccacatgtatgactagaaactgtgactcctgctacaaaagaagggtacacagtgctttgaactgaggggcagggtctcagggaagtgttctctgaagaagtgacattcgtacagggatctgaaggatgagttggaattaaccgggagaagagggcagagaaaagcagagccccaggaggagggaatagcatgtgcaaaggccctgaggtgagaacacacctcccattccagagactgcagggaggcccacggtgcaggggtgtcgagattgagggatgacatcctgtgaggcaaggctggaaggagaggacaaccctgggcctcgatggcctgatgaggctgtggctctttctcatatgggtgatgggcaatgttgaggtattttaagcagggagagatgtgaactgttctgtgttttggagagaccggtaatagagtggcctggatgggatgtgtctggaccagttgggaggcgattgcgtaattcagctgagagatgagggtggcgtggccatggagtgggcagaattggacagytccagggatatggaggaggccagtcaacagccttcggtgctgggtcacacacgggggcatgtgagggaaaggaagtgccacgggtgacctgggcctctggctgtggaaccgttggttggtgatgtccaccacagctggggtcggggtggggagagtattgcatgaggttttggacattctsatttgggggagcttttgagtcatctcggtggagaagccaagaacacaaccgggttcagagttctgtagctcagagcaagtggtgtgtttcaatgagctggcacaaagaaaagggatccaattagtaagcatagtgaacagtaggggatggagtcctcaggatgattgagaagcggcagccaaagaagtaggacaaaggaacgaaaaagccagaaggtggcgttgccatggaagctggagagaagcgagtttaaggaaggagggagggactctctgtgccctgagaggccaagagactgaggactgcatgctccccattagacctagagatgtgagggtcatattagcaaagcctgatgctttaagtggatggaggtgtgagtgggaggaggagaggtgagacttctctttttgacatctgcctgtgaagggtgggggtgcaaagaaacagggcagtaagcctcaagggaggtttaaaagactgactgcaggctcccctttctcatctactttacatttaagattttatttgaaaaaaggatgatgaagtgaacttgttgggtctcggaggcccttttcatcttggcattctgtgccaaaggaggtagcttggagcagtgggtaagagttcagactgtctgacaggtcttggataaccttccttcttctgcttactagttgtacgctcttggacaattgctttaccctctttgagcctcaagtttttcatctgcaaaatgggtatattaattttcactttacaggacagttgtgaggattgaatgaacgaacttatgtcaagcttttgtggcattatctgacaaatagtaagcattccataaatagttatgatgatggtgatgatgatgacaatggtggtgatgatggtggtaatgaagactgaagatgatggtgatgatgtcattgctaatggttatggttaatgatagtgagtgatggcagtatgacaatgatgatggtgggagtgattatgaaaaggatggtgatgatggtgatgataatggtggtgatggcgatggggtgataatagggatgatgatgatggtgataggatggtggtgatgaagatggtgatgatgatgatggggtgataatgatagtgatgatgatgatggtgatggtgatgatggtggtgctggtgatggggtggtgatgatggtggtggagtgacaatgatagtggtgatgatagtggatggtagtgatgatagtggatggtggtggtggtgatggtgatgattgtggtggtggtggtgatgttagtgataatggtggtggtggtgatggtggggtgataatgatagtggtgataatagtggatggtggtgatgatagcagatggtggtgatgatagtggatggtggtgataatagtggatggtggtgatgatagtggatggtggcggtggtgatgatggtggtgatggtggtggtggtgataatgttagtaatgatgatggtggtggtggtgatggtgatgatggtggtggggtgataatgatagtggtgataacagtggatggtggtgatgatagtggatggcggcggtgatggtgatgatggtggtcatggtggtcgtggtggtgataatgttactcatgatgattatggtggcggttgttgtgatggctatgactgtggcgtgacattatagtggttataatagttgattgttgtaattatagttgattgtggtcgtcgttcataannnnnnnnnnnnnnnnnnnngtggtgataatgatggtggctgtcatagtgataatggtgatggtgtgataattatggtgatgatgatgatggtggtgatggtaatgatggtgatgatggtggtagtggtaatgatgtggctaccattggaacacttgagtctgaagcatcatgatgcatatttctctgtcccagttgaccatgttgttcctgaacctgggtccagcctactgacctctttcgagaagtggcacgaagcagctgacaccaaatcctgctgtgattactccctccacgtggacatcacaagctggtacgatggcgttcgggaggagctggaggtgctggtgcaggacaaaggtcagttaaagcctcggaayggggttttggggaatcccttgttctttggtagatccaaagattatgtggagtgaaaaatccccctgtctgcatctgttctgagcctgattatgagctgcactctgccacgtgacagtgaggaaacaggccagtccctttacagagtccatccttttctccttgaaaacctctgggggtgtccttgttctcagaagcagatccagtctctgcagcctgctgtgcccaggcccttgctgatctaacttcacttttcttttccatcacccggatcactagcctggctgccatccctgaaactggctatgctgtgaggcccttgctcatgtggatcccctgccaggaatgaatgccctttctcctctgcctgcccagtgctactcaccttcaagacccaactcaaccattaccttctcccattgcttcattccttgaatagccaatgccggttacttaggcctcctttggggcactttttccattgttcctggattatgggacatggtttgtctgtctggctcttctgccaaaccctgagctctgtgagggaggggaccacgtctatatgtccctgcttcccaccttggctcccctctgtttgggttcacaccagcacagtgtagacctttatggtgtgtgttacatcgaactggggggaactgatcagaagacacaaaggaagcaaagaacagcagaatggaaagagacagggcatgagcgatctgtccagaaaggggcagtcggggagccctctgaggaggcagcctcaaatggtggtgcttcaaggagagcgagggtgtgtttccaatttttaaaatagctgtgctatgttttctcgtaataacagtatcatccccaatatttaaagaaagtcagaaaatggaaggaaaaaaattgttttcctctggttctacccccaatcacaatttactctaaatgtgaaggattattgctttccattccctgtgtatttggatgatttttcccctatgtggttgtgcaatagctgttatgtggaacccttcttttttcacttaacattttatgagtcaaattacttttcatcaataactttttaatggcttgtaatgtataatataatggttaatttgcttagctattttctttttattgggcatttatgctttctattcgttttattataaatcctgttacggtgaacatctttgtatataaacatttgtttgcatttctaatttttctttagatttccagaagtggaattagaaggtcagaggttttaacatttttcaagattatgacacttattgccaaattggtttcctgaaagatgcatccccttgtacccctgcaaatcctatgccagaatctctagtccctgcacctttgcaccattgggcattattgcttctatgaaatccttgccgattcgatgggtgaaagacaccaccattgtggttttcatggcagttctttactgattacattcaacattttgcatacatttttccttatgtgaatagctgattgtattatttgcccactcttcaatttgcattttcatatgtctgtttaagctctttctatcaagaaggcattattggccatggtggctcatgcctgtaatcctagcacttcgggaggctgaggagggaggattgcttgaggcctggagtttgagaccagcctgggcaacatagtgagaccacgactctattaaaaaaaaaaaaaaaaaaaaaaaacatagccaggagtggtggtgtacgcctcccagctacttgggaggctgagcaggagcattgcttgagtttgggaggttgaggctggagtgagcactgcactccagcctggctcatagagtgagaccctatcttttaaaagaaaaaggcattatccttgtattgcagttgctgcgtgattcactgcaactacataacagagtcataatccaaggaaattgacagtcttgtatcttactttccttacctaatgttaagttctgagcaattttccccaggttgccgccttaagcaaatggtcgtttaggacgcccctcactgagatgggagggtctctggagtggcagtggagtttgtagggaaagacactgggctccgtgaggcctagtgggtctgtgctgcctgcaggcatccagggagccctgtgctgtgcgcatctgggctgggtcaccagcaggcgaatggcgatggtgctcaggtcctggcagcaacctttcaactttgtatgcttctatgaaatcaactttttagattccacatataagtgagatgctgcagtgtttgcctttctgtgcctgacttatttcccttaacatagggttccacagcttcaactttgttgctgcaaatgacacgatgtccttctttactaaggcatccattgtgtatgtttaccacatttataaaatccattcattcattgatggacacaggttgcttcctaatcttggctgttataaacaatgcctcaatgaacacgggagtggggatatcccctgggtattctgatttcaattcctttggattttcagccggtagtgggactgctgaagcatatggtaattcagttcttagttttgtgaggagcctccgtactgttccccatagaggtggctgtgctaatttacattcccacaaacggtgctcaggaattgccttttctccacatcctcatcaacacttgctatctcttagatgcagctctttctttctttccttctgatggagtcttactctgtcacccaggctggagtgcaatggcgagatctcagctcactgcctcccaggttaaagtgattcttccccctcagcctcccaagtagcttggattacaggcacctgccaccacacccggctaatttttgtatttttagtagagacggggtatcaccatattggccaggctggtcctgaactcttgacctcaggtgatccacctgccttggcctcccaaattgctgggattacaggcgtgagccactgctcccacctgtgtttttattttctaatcagcttaaatgctctcagcaattccacattatccccagaataaattgcaagctgtctgcctggctcatcaggatgckcctgctcctccagactggcttgttccagttcctggggcccagagccccagccccctgcacctccgtttcccatctgctcgaggctgcctctggctcttggggctgtgtgagtgagcactggccccttcaggaacagtctccctgccttttcctagcgattctcctgttcgtgctgagctgtactcccctgggaagccttccctgaagccccctgacagatgcaacccccccatgcatcccccacatagggatcatcagactaagttgtctttgcccattgacttgctgatactcccacaccccagcccagatggcgagccccctacgggcagggacttgtcgtcttactcacagttgcatggctgggacctgcacagagagttgcatccaatatcagtggaccagctgattgatttcatgaaagatgcctttagtaacttctgtatctcaagtgcttagcacatgcccagcatacagcaggctctcagtaagtgtttgtaacatgaataaataagttaggaaaggaaaagaggagagaagcagggagggagggaagaaagggaggaggaacacgcctggtttccttggtcctgaagcattttagtgcgtccttctctaagtcagaagggcttgcccagaaatcttgctatttgtcatgagtgtactgtgcagtccagtgcagggcatttccaggatgggaaaccaacacgtttggtgtaatgtcctctttgcagaaatggggaaagtgaaacccagagaggtgcagtaacgtctcaagtgccacacagcaactgaggcctgaactcagctctccctgacggagcagctgtcactgktgatgtctttatgggaattgcaaacacaattctttaaagaaatgggataaaaaagcacatgctttaggacactttctagaagctgcatgactaatgtcttttcatcttccgtattgcagatgctcatcacacccttccttatccttaccacacccctccctctcagcctggggagttttcctcctcctcctcgtcctctttctcctcctcttcctcttcctcctcctcttcctcttcctccttcttctccctttctcctcctcttcctcctcttcctcttctccttctctttctcctttttcttcctcctcctcttcctcttcctcttcctcctcctgctcctcttcctcctcctcctccccttctccttctttctcctcctcttctttttcctcctcttcctcttcctccttgtcctctttctcctcctcttcatcctcctccttctcctcttcctcctcctcctctttctccttctcctccccttcctcctccttctcctccctttctcctccatcaccttcagattctgcttaggtgtgaccttccctggaagcttcctttgaccttcgcccacatcctcaggctggataggtgccccactggggatcccaatggcactcatctctcctggcgactaccactctgctctgtggtcattgatttattggaaagacatgcttctgttttttcttaaacatatttttctrtcctttctatcttgaaacaggcgtcaattccttccaagtctacatggcctataaggatgtctaccaaatgtccgacagccaggtaggtccctcacactcactctctcctctcttgtctgggcaggactgggccagctttgccagtccaggcagcacagggcaagggagattgtgagaagccgtgggattcgagtcctggttctggcatggaatggctgtgtgatacggtgtcagtcattgccccagctgggcttctgttcttttctgactgtgtgagtggcatgcagaaggggttccctggtttggtggctcccaaatctggcttatcctcagcatcatctggagagctcacttgaaatacagattcttagtgcatgttccagatgttgggtgttggactcaggagcctgtacttcccgaaagctctgcgtttgatcctggtattcaggcaaggatggggaccatttatgagctctgacacaggaagagagactgcctggccttccctcacagcaactgcaacatgctgggcaagtcatctcctcacatttgtaagatggaacatttctggccctgccaacagcaaacaattattatgtacatgcaccaagtcaagggatatggagccgcaagttgttcttcaggaggagtggttacgacttacaggacacctggccttcttatactactgggtctcctagttttgtttcaytgtcagtttcccttgctctgcttgttagtgtggtggagaaaatcatggaggctacagccaagccaggtgcttgctctgcagccaggggcagctttcccaacttctctgtgctttaggctcatgatagccctaccttatagaggcasttgaatgatttcataagaagagtaaagtgctaggatggtgcctagcagagaatggtgccatacaggcatcagttagcagggtaattggttattaccatgaagatagatgggcaacgggagaagcactttatgtccttcctttcagataaacacttggggttacagaaaataacttatcccaagatgtcctggaggcctttgatacagtcaacaaaagacaytcaaagagctgaaaattggttcagttacatagaaaacatagcatgtgatgtgctggcataattgtgattttcacctgtttcattctaactactggagccatgggcatggatggaatcgagcagcctctgcgtgcaggttctcaaaagtgcttcatgcctccacatgccttccctatttgctgaaatagggatgtctgtcggaaagcagacatccgaggggatgttgtcttgcatgcatggagaacaaagttgaggttcaagtgtccctggagagggagcttcgtggctttggcccttaccaggggcaatgcccaaatgcagattctcctcaggtaggaagagaacactgggcagtggggagggcctgttttgtctaattgagaggatggttggcatgctatatattttctgagtattggagttattagagagctggtttcccccaccccaccattgtccataaaatggcatgggttcatatttttgtaaggatgcacacatattctgtggcatgtaggtggctatggtacaggcttagcagatttagttagataatttctgtaaaactaacagtgacttctcaggaccagttgctgccattaacacctacaggtgtttcaaaaaagccaacccaaaaagacagcaaaaggcatagataggcactgagattgagtctgtcttcatgccctggggtgacttggaccagttgtgccccatcctcagcttcctgcttttgggtctgcaagatgtcagggtcaaggaatgatccttccaagtctgacttgtgtagcagcrtattccatccacatgaatgtgtttgcagaggctggcaggtgaatgaccgaatgggtgtgatcggaacggtcttcatgaatgcacacgctgtgattttttttttttttwaaatctcacaccaacccctgtttatctctccatagctctatgaagcctttaccttccttaagggcctgggagctgtgatcttggtccatgcagaaaatggagatttgatagctcaggtgagtggcaagaatttccactccttctacctcagtctgattctccttgttgcaaaaggtttgataaaagagcattggttagtgaggaggctgtacaatgaaaggtcaagccaggaactgggtgtcatatcagacacatcagatatgaatgaaaatgctttgcaaacctaggtcataccagtggcaatgcacatggaagctggtgttcctcattgtcttcaggaattgggagtgggcatcatggaaaagcccaggcttggaggaggtgttccatgccagtctcctccatctcctagccatgtgaccttgggcaaggaactttttcccatgaacactcttatttttcttccagaaacaaccacctggcagtgttattgtgtggatcaaatgatattatgtgccatggcttgaatgtgtccttcaaaagttcatatgttgaaaacttaatgcacaagctagtatgttgatggtatttggaggtgaggccttagggaggtaatttggattagatgagatcatcagggtgggggccttatgacgggattagtggctttataaggagaagaagagaggcctgagctggcatgcacctgctgtctcatgtgatgcccaccgcmatgctatgatgcagcaagaaggccctcaccagatgctggcaccttgttattagatttcccagcctccagaaccatgggaaatacacttattttctgtaaaattaccaagtctatggtattctgtwatagcatcagaaaacagagtaagacatcgtgtatgtgaggttcagaatctgacacataatggactgcagccatgcaaaagttttggataaaatgagacatgaacatattttgataattctagctgtggagtggagaatttgttgggaaaagaatgaaagctgggagttgtggctcacgcctgtaatmccagcactttgagaggccgaggtgggctgatcacttgaggccaagagtgtgagaccagcctggccaacatggcaaaaccccatctctactaaaaaatacaaaaattagctgggtgtggtggagcacacctgtaatcccagctattacaggtgggaatacaggtattacaggtgagaatacagccattatcaggtgtgaggctgaggcagagaattgcttgaacctggaagktggagcttgcagtgagctgagatcacgccactgcactccagcctgggcaacagagtgagactctgtctcaaaaaaaaaaaaaaatgaagtcagggtgactagctaggttctatttcagcaagtctcataagaaatgaagagaggagataggagatggaagaggtgagcatgacaggagggaaacacaatctacaggacccatggacggattgggtggaggaagaagagaaagaagtcaggcaggctcctgggtctctggtgcagaggcatggattggttataatgttgtaaatcaagccaggcttataggggaaggtttggatgcagccagtaaaggtagttaatgccagacatgatgcaaaggacttcacatattgatactcacaactactccgtgaggtagatataattattcccattttatagatagggaaactgaagctcagatatgaataagttgctcactgttgctcatggggcagtagagttaggatgttaaccagttccctctagttccagagcgcagtggaagagcaacatgatggttcagtgctggagatctaaagcttcaccattaaggttcattgacttcacttcttcttatctgagtccttgtagttttcctgcacaattgaaattctttcaaattcaatgtaaaaaaccaacagtgccttagttccatcatgcaagagtattctgttcattgctaacaggtcactgcatccagcccacactcaaaaagaagggattatacaagggcaggaatgtcaggaagtgagaattattagggccacatctgagacttcctcccaatctgtcttctggcccccatgattgatgttcctctcccatgcaaattacaatcaccccttcccatggttctccaaaatctcataacagcattagttcacagtctggaatctcatcatccaaaccaggtccaggtgtggatgaggctccttggctgtatttcccataatctgtaggtctatgaagctaaagaaggaagatatctccctgaccctcctgayatacaacatgcagtggtggacctgacattcctattcaaaaagggaaaaatagaaggcaccaaggagttattggttcatggcggttctgaaatctggctgggaaatgttggcagttccttgactgggtttcaaagcctgagaataagtctccatagctcttggctctaccttctgagctcctgcttccatcctctgagtcatccatcctttttcgtgaaaggtagtacatgtctgcagctgagtggttttctcagcctgcttcttgctcagtagaatttcagggatcagccaggcacggtggctcatgcctgtaatcccagcaatttgggaggccaaggcgggcagatcacctgaggtcagaagtttgagaccagcctggccaacatggcgaaacactgcctctactaaaaaaaaaaaaaaaaaaaaaaaaaaaaaaaaaaaaattagccgggcatggtggcgggtgcctgtaatcctagctacttgggaggttgaggcaggagaattgcttgaatgtgggaggtggaggttgcagtgagatgagatcacgccactacactccagcctgggtgacagtgagaccccgtcttaaaaaaaaaaagaattttggggatccaactgcttcttttcacatcacatgcctgtgttcagtctcagcttccagtattttgctaaggcaactctcctaaaaatctgtggacctcctgtgaatctcgctggggttcacaccataagacaaaaggcacccacttcttccagataatccctccgctaccctgatgagagagctgagagacacaactgcaagcttcccagaggccctgtagtttgactgagatggtccacaggcacagccttcatctctttgaaatgtctcttcaaaaaaattttttttaaatttttttgagacttaatctcattctgtcatccacactggagtacagtggtgcaatcttggctcattgcagcccccgtctcctgggttcaagtgattcttgtgcctcagcctcctgagtagctgggactataggcatgcgccaccacgcctagctaatttttgtatttttagtagtgatgggtttttaccatgttggccaggctggtcttgaactcccgacctcaagtgatctgcccgcctcggcctcccacagtgctgggattgcaggtgtgagccaccatgcccagcctaaaaggtccctatttaaaggatctctttcttgtggctgataatactgggaggcaccacccctcatctttctgagttcttaacaaggggctgtagactcacatccttggtttcttcgcaagactgtttatggctgcttcttgcctcctgtgaggactcaatgtcctcagaggccctatttcttctaagagtccattcaaggctatttaarttgctgtttgggaattcatttgctgcctggttccagakcctcttccacacatttagatatcttttatggtaacaccctacttctggtaacaaaacctgtactagtcatccatgattgcataacaaattacttcagaacatagcgtcttaaagcaaattatctcatggtcctgtgggtctggactccaggtgcagctcagctatttctgrctgagggtctcacaggccatagtgagtggcaggttgggggcggtgagcatctcaaggctcaactggtgcaggatttgcatccagcctctcgtaggtggtgtatttctggatatagctccttgctagctgtcaggctaatgtgatggtctgttctttgctggctgctggccagaggcctccctcggttccttgcacatgggcagccccagcgaggcggcttccttcagagcagattaaccaaaaagcagtaggtgagcaggtcggaagccagagtctctgtaacctgacctcgggagtgacagcccaacccttttgtcttgttctgctcatcagaagcaaggtgctgggtccagcccacactccaggggaggggaccctgcagggccttgaaaagcaggaggcgggatcactgggagtcatcttagaagttgctgccacacaaatcttagctgattttaaactttctaaaaatggaagcatacagcacacactgtcttatgtccggctccatttgctcaatccgaggcgtgtgagatccatctttggccaggcatagcactagctttttctatttcatcggtgtgtagaattccaccgcacgaatctgcacaatgtattctccagttgttggatatttggatagtttcacatttggaaccgtgatgcgtgaggcttctgtgcttgttcttgctccactcttgttcagccttttattaaccataggttcacatctttagctggtatatacctaagagaggaatggctgggtcctagggtgtgtgtagattcagcgttagtggttactgctacacagtttyccagcgtgcacgcacccctgcaccagtgtgagagaggtccagcctgcagcccccagctcctgagtggcacataaggggctttgctctcctcactgccagcagagatttagctgttccagctccagcacatccgtcaccttttggacatctgctttccagctttcaacattttgttcctctggtcttctctgtagtttcttggttcctgtgtgtctctttctcttgtgacttctgtgtgttttggaaggcagtgaaacaaatgcatgtgtgtagtccattattttagactagaaatcctactctcgtctttgtttttcttcatcatgtcatctttcatcctcccttcctcgcctcttctccctccctcctggctttcttcccttcctccccttccctccattccccttccctcccctgccctccccctccttacttcctctttccttccagaatagtaactgacatgtaaacaatttcacagagggatttctcggtattctaaaatctttttgtaaacattttctaaaaatgctttgtaaacagtgtcttcggtagctgaaattattccattgtttacttcaatctacccagctgttagactttgaaatggtttcccatttatattcttgtaataacctcgagcttaataaccatagacgcgcagttgagattgtgatttcttttcatgggtgatgaggcccagggttcatgacggggtgatgtctaagaacaatgacacagacactgaggaagttaaaattagcagcagtacagctggcatctgggcaatgtcaaattttttttttattttttattttagaaattaaagtgttcctgggacaaagaaactttggaccagatggatttgaatctaggccatcagcccagggaaccatttcaaggttatatgataagtttcaggtagtggtttcccgccataaagacagatgccaggaagaggcagctgaagtaggtatgagagccggctgccaattaatgagcgtgtgctcgctcagctccaggttttgtgctgagcatgtttcgtatgctcgctcatctgatcagcgtagtaactctgcagtacaagcaccgttatccccagtgtacagaagaggagactgaggtcaagagagcttgaccaacctgcccaaagtcacagagacggctgttctggatctggactcccagtttcgggatctttgatttcaacatcaaagactagagtaggattcctagttgaagatatccatgttgtaccsaaacaccacgtttcttcccagaggagaggcctgcagggagactccgagattsagagrgtggtgggtggccttggaagctcgtgtcttataaccctgcttcctctcattgatcccgggagattcaatataaagcaggtgcagatggagccatgcagggctacaaaggggaaggtggatgggtgtgtagtggaggggacacagttcactgcccccaccccgcacactgttaacctagtgcaagccactcgcctctttgggacccagctgccccctctgtctaaccagggggttggaggagtcacttctcccagctctgacaccctctaatcrttaactcacttgttcttgtcttgtaggaacaaaagcggatcctggagatgggcatcacgggtcccgagggccatgccctgagcagacctgaagaggtaaggactcctcaacttgggcatgactctgacactcrccactgagcactcaccttgatgctgttccagctggagtagcccasccaggacccggcctcttcccgtgtcctctcccagaccatcccaaaccatcttgttttccccgggaaccctggggactgctggctggagaagacaggaagaggtgctgcctctcccagggtcctggaacttcactccaaggccccgtgggtgcttcagtgtcccaagtggatacggattctcatggaggacatggcatagtggataataggaaagtggagccgcatgcccaagcccagcacccaggagacaactcccactgcctgccstgttcccaagccttgaaaaaggatgacttcccctggactggctgtgtgtgtatgtgtgtgtgtgagtgtgtgtatgttagtgtgtgtgtgtgagagagacagtgcgtgtgtgtgtgtgtgagtgagtgtgtgtgtgtgtgtgtgagagagtgtgtgagtgtgggtgcatgtgcatgcacctgcagggagtgtggaaggaggaaggcaagctgatcgggcatggaatagagtgggcaccctggcagccatcctttgagttgaggacaccttctttttactttctttctttcttttcttttctttttttttttttgagatggagtctctctctgttgcccaggctacagtgcagtggtatgatctcggttcactgcagcctccgcttcctgggttcaagtgactctcctgcctcagcctcccaagtagctaggagcactaggcacaggcctgtgccaccacgcctggctaatttgtgttttttgtttgtttgttttgtttgtttttgagacagagtctcgctctgtcgcccaggctggagtgaagtggygccatcttggctcactgcaagctcygcctcccgggttcacaccattctcctgcctcagcctcccaagtagctgggactacaggcacctgccaccacactggctaattttttgtattttcagtagagacagggtttcaccgtgttagccaggatggtctcgatctcctgacctcgtgaatagagactgggtttcaccrtggtggccagtctggtctgaaacttccgacctcaagtgatccatccgtcttggcctcccaaagtgctgggattacaggtgtgagccaccgtgcctggccaagttgaggacattttctgatgtcctcatcaggtcattaccgagtcttctgggcccatgccctgggcctggtgtctgctggacacaggggacacagacatgagtccacatgagtggacaggttccgtgtcctgaggggcttgagatcccacccagtgctcttcatgagctccacagcccagggatggccacgagctgtatgttcctggcccatggtgaggtcaggacagaactgggaggcagtgctataaacttgtatagcgcttggatgttgctgccgtatcccagcgtgagaccartgctccaccmcggagagcagggggcactgtcaagcgctgttggactcagtatgtccttctcrttcaatggagcagatttcccttctgatcacattcaattaaggaaaatggagatgggtggtagctgttacmccagccttccctcctgtgacactgtgtgtgccrtgttcagctggaggccgaggcggtgttccgggccatcaccattgcgggccggatcaactgccctgtgtacatcaccaaggtcatgagcaagagtgcagccgacatcatcgctctggccaggaagaaaggtatgcagccggccctgggccttctgggggcagctggggcctggaagggggtgtcctgcaggttcaagttcactccctcccgaactcagacaggcagccggaggagggaggggtggagcggggatgctcctgacacaaggatggtggctggaattctttggtcccaatgaccttaggayattcacctcgataagctcagctccatttaaagagaattttaataatatattatgtttaatctaatggatccamatattaattcagcatgtcatcaatgtaaaaatcattaatattttgcatgatgttttctgtactctcttcaaaattcagtatcttacatgtacacaactcagttcagactaaccacagcctcaggttattggtggccacatgcggctcaggactgccttattggacagagcagctgtggaccccaaatatgttgttttagtgtttttaagggcaagctgacaagtagaggctagaacagcacagcttgcctgaaactagctccattttgaagataaggaaaccggggctcagagaggttacagaaatctggaagcggtaccagccgggagcgggtaagcaggcaggttctggagctacaggaagccataaggtagccactaaccacacgtggctatctaaatttaaattaagtaatgttaagtaaaatgaacaagttagtttctcagtggcaccagccacaccagcttaacagccacatgtggccggtggttgctggttgggcagctgtgatacagggcacccccctcgctgcagaaagcgctgcttgatgggctgccctagagccgggcagagcttgcagctgcctctcctactgggcagcaggtggcctcaggcgagggcagcagggggtctcgggccacatctcttgcccttggtctctaatgcaaagatctttcctggggagcccgagcctctgcctgcaggcttttctggaagaagcccgccaggccgactccttgaaagacaagcaggaacttctgggaagttagtgctcgggaagccgccctccggcactgggctgacagaaacacatccaactccctttcccctggggtgggaggaccctgaggcgtgttcccgagcaggactgagtgccagggccctcagctgtgcctcgatgagaaatctccctttattggctgctttccctgccttatgtcacttcctcaatccccagccagtgtttcctggaatcacctcccaaataagactcttgaactagattcctaagatctgcttctggcagaaccctaactgagagagtaaatcgtgtctccatggcttggcttacaaatctataaaaggacataataatgtccaaatcgtaaaagcaacagccatatccacaggttgctgggtgagtcagctgccgtacgccccatggagcgcgtggcggggcgccgacaatgtggtggagctgggcccggacacccaaggtccctgcggtgcaggcggtgatgcctgcaagaacggtggccagtgttctggccttcagccagccccgttctccctccacagtcttccaattttgtgcctttgacatctgcctcaagagagtatttgcttttaaccaggcttatgttttcccctcctaagggcccctagtttttggagagcccattgccgccagcctggggaccgatggcacccaytactggagcaagaactgggccaaggctgcggcgttcgtgacttcccctcccctgagcccggaccctaccacgcccgactacttgacctccctactggcctggtgagacctgtgagaacgtggggctgggggaggcagctggggcctttggaggcagagagttaatggtgggaatccgcaggctggtttggactcatgattgtagaggaggctctgccccgtgctctgcaaggactgcgctcatatggcttacaacaggccctcacggacctgaagatctgtggcatccagtgactgttccattcacatcaattgaccacctcctgttgagccaacctactgttaagcacctgctctgtggcaggcaccatggtgtatcgggaagcactcaggatcagggatggagacaaggctgtgtcaccccggacctggcacgtcacccgtgacatctctctgtctccctygttttactcaaagtggaagcagacagtacctgtggcagagctgcctatgggacagtgcaggaaaaggacctggaaccgagtgctccagaagtggccgctgctgcctgcagcacacttgctgtggtgcacgcacactgtggagcccagcacctcagccccttcccttctgttagccaccaggagggaagagcacttagcaatagcagggccacacagcgaggctaagtgtccaggccgctctggaagcagagacgcatgctcagaacccaccgggaggcttgcagaaggctttctggaggagggggcatcaagactaaagcttggggatgagtaggagtttgcccaataggggaggataagatggggcttcttggcagaaggaaccttggaggagggggcagtggtgtgcgcccacgtggaaatcaccatccccctgatgatacagaaacctttgactagcgtagccaagggcttactcaacatctgcagtccaatgtctggtgggcagctcacgtttacaaagaactgcagatcttcccccataaagctgctagtcccacagtcttgcccatctaagaaaatgtcaggaacacggaccagaggccctagagtctgacaacgcctcacctgtctgctgtggccatcctggctcaggccaccatcatccctggcttcckaccaagactttctatttccacacgggcccaccccaccctacccatcacagtctgctgtcagacatttagaacctagattagatcaagcacccctctgcttggaaccagtaagtcctctgccagtgaaacccaagtcccygcaacatccaacaaggcagaactcaatccggtgcacacgccctgaccaacctccctccctgggcctcctctgcccttggctccctcggtccagtcccagcttcatgctgaccctgaaccccaggcaggaccctgcctcggggcctttacactcatgggaacccctggctagttccctctttcttagacgccacatggtttgctctgtgacttccttcagatctttgctagaaggctcctcagtgacgtaattttctgattatcctcctggaaatggcatctccagcctgtccccagcacgyctcatccccacctgctttggttgaatccctgacactcactctracagcgcccatgtgccccattcgcctctgcttattgccagwctcccccatccctcagtatagctgacacatgcagaagctctctctttctgatcttagatgcagtccccattccttaaattgtacygggcacataggaagcatgcaacacaattttgttgaataaatgagtgaagaaaacttctaaatatactcctctgcatctaggcaattgctaacatttcctgggcctctggattggaggacagcctcaccttcctcaccttgcatttagaaccactaataatggtccattcattttttattttattttattttatttattttwttttattttattttattttattattttattttattttattttttgagactgcgttttgctcttgtcgcccaggctggagtgcaatggtgcaatctcggttcactgcaacctccacctcctgggttcaagcaattctcctgccttagcctcctgagtagctgggattacaagcgcccaccaccacgcctggctaattttttttttttttttttagtagagacaaggttttgccatgttggtcaggctggtcccgatctcctgacttcaggtgatccacagcctcccaaagtgctgggattacaggtgtgagccaccacactcagcctggtccattcattttattgtcttaggtgttcagctcagggcacctgatatatcaaagagtatttgtttttaaaacaccaggggacaaaagggtaaatcccagtgaacttgtgccactttgctgtaaccaatgaatagtgtttgttctgcaagcacagcacaaacactctggccagcccttaagccaactgccttatgtcaagaagacaaatgtcagcacacattactcactttgtaaygtgcaaagcatgaggccagtgacataaatggggcatccctgacttgtgacacgtgcaggcacacgctagagagtctctcttacccactggcttccttatctattcattcattcactggctgtgctgcatgtacctgtctgaagtcaggatttgccttcaaaatgaactagggtctgaactctaccttgttttgtccttgccagtggggacttgcaggtcacaggcagcggccactgtccctacagcactgcccagaaggcggtgggcaaggacaactttaccctgatccccgagggtgtcaacgggatagaggagcggatgacsgtcgtctgggacaaggcggtggtaaggctggatctcttctcaggagcattctagaaacactctacctgccctgtgaaagccgatgcattatgcacgctgggttcttaaaagttcccttcttacatggaggcggaagcagatatactaggagggcgcaggagggaaygcataacttgagagatagtagctcaagtccgggagaggcctctgcatttgtggatgtcacccttgtcctttacatcttaagattgaaaaatgttttgttttgtttctcaaccacrtcttagttcctgtggaaatggctctgtaacgctgtgtgtgtgcatgtgcacacgtgttaggagttgggatgttgagtgggtagagagagaattcctgttgcagaggaagagctgggtctcactctgatcactgacctgaaaccaaaggtttttaatcttctgttaaactggggcctggtgacatggwcaagatgtcatagtggctcttgcgtcaacatacctctgtgcggttaattaaatgtcctctctgatgaggctgggccttctggggttcttgatgatggcacgtttttagctgggagaggagagaattccaagccttgcaaggcctcagctggcagtcttccatttgtgcccagcygcccctcctcctggccccattatgagatgctcttctcatctgtgggtcttgcctgtaggctactggcaaaatggatgagaaccagtttgtcgctgtcaccagcaccaatgcagccaagatctttaacctgtacccaaggaaagggcggattgccgtgggctcggatgccgacgtggtcatctgggaccccgacaagttgaagaccataacagccaaaagtcacaagtcggtaagtcctggcctatttgtgctgctgagataagtgattcttcgttgtaatcatttttaaagactggttaaaaatgatttatgaattttccaactaggatgtgatctgatatctagcctgactcagtcattcccatttctcctccagttggagagattgggaggagggatctgagcaggctcaactaagctgcttctccttctctttctctctctctcttcctctcctctctctctgtctctttgctcctgcccatgkatgcatgtgttcccagccatctgacactgcttataatgtgtaagcttcagggctcagcragggaaagtattagatctaaggttctcaatttaattatcaagctggaaaggatttgatttggtatgtcggaaacctcccactcggttttgtggctggctgctaatagacaggaaagggttggccctaaagtgcacactttttcacattccatgcccatagttatgggccttctctgctttgtatcttatatgcctttgatttctccactcatccagcaacctaccaaagatgcgtgcacagagagggtgcatgcagagatggcagaagacaactgtgcctccctgaagggcttgctttaacaccctcctgcatggccargagtggccttgggtctggattaacaactacacgcacagacccaagaggccacagtggtccctggttcactggagtctgtgcaagcacacaggccagaagtagtgcatgtgcacaccgtgatggagctgcagtgggtgttcccatggccccatgggctatgggctcacatactgcagaaggagtatgggctcacatactggagaaggagtatgggctcacatactggagaaggagaccacaggtgtggggacaggacatgargcacaaggaagtttcataagaaagccacaggaaacacttgtarcagctcacggccatggccctggagtatccattggctgccacagacatggcctgcagaagcagaggtctcggtagctgctcactgaccttgtccggctcaccaatccaggtcattcttataatacacaatgctccctggtaacactacttgcttcccacagcccccatctccagggaacggggtgcctgagatcatcttcccatggagaaaggtttatgccacgcacatgtacagtccagcagggcttgcaattctattatttattatgaattatttcacgtgtgtacacactgcttggggtctgtgcacataggagaggcaatgggagagcgtctgagagggtcttgccagtgagagggtgtcttggtccattttgtgctactgtaatagataccacagactgggtaatttataagaaaataaatttatgtggctcacggttctggaggctgggaatttcagtattaaaatgccggcatctggcaaaggccttcttgctgagttatcccatggcagagggcagaaggataagacaggacaagtgtgaaagaagtatcaagaggacgctgaatttgcttttataacaagcccagtctcacaataactaactcattcctgtgataatagcattaaccattaatgagggcagagccttcatgacctaatcagctcttaatggtctcacatcttaataccattgcaatggcaagtcaatgtccagttgaattttgaggggatattccaaccatagcacagggtgtgcactcctaccgccatctggctgtgggagctgccccttgcttcacaaggtgatccttatctagaaaggaacgtgaatgtctgtgtcagccagtcaaaggtcggcggacaaggacccagaaggaagtagactgagctgggattgtcttactattccttttgttgttgttgagatggagtcttgctctgttgcccaggctggagtgcagtggcgcaatctcggctcactgcaagctccgcctcccgggttcacgccattctcctgcctcagcctcccgagtagctgggactacaggtgcctgccaccacgcccggctaattttgttttgtatttttagtagagacaggtttcaccatgttagccaggatggtctcgatctcctgacctcgtgatccgcccgtgtgcggtcccaaagtgctgggattcaggttcaaacacgcacccaacctcttaattattcgtttgtgatcagaggccctaccgattcctgttccagttggggcttctggattacgagtcaattccaggcaataattcttggctaggacagttcgtgcttaaatatgctccatgcgggtttcggtttgatattcctggtccgaccgaagtttgctaatttgcatgttttaaagttggattgtttgggtgtggtttcttgtcacgcgtgatagttatccgtgaacccggtttaatagggtcccgtcgttgggtggggtcaatctgaaaaagccgcccgtacaaatgttttggccgggtttgttgggtggttttggctgttggtttttgtggattggttggttggttgctggggttgatttgtggggctgtctggtgggtgggttggtttgttggggttgtgcttttcggtccgtgggtcnnnnnnnnnnnnnnnnnnnnggattgggagagaggagaatatgtgagcgggtgagtggaaaccgctggataggggggtgtgtaggcgaaatagaggaaaaggggcaagggaaaaaagggtatgaaaaaaggggttctttccaattaaggaggggggggtgattttcggagccaatttgtggggacaactctcgagaaaaaaggggcgcgggcaagactggggttttcgtggtgggagaagaagagaagtgttttgaggggggggttcaagagggtttttaaaagcattggggggagtttcagggtttttaaaaaataaccggggatattgggggaaaaagggccttttttggtttaagagttttttcccaaggggcaaaggggggagagagggtataaggaacgggccccaaggtggtaaaaaaagggattcaaagggggcacggtggaattttgggtttggtaaaaaaagaggcgcagttttcccacaataaacggaagtgcatttcgtggggataaaaagggctttagcccattaattggaggggaaggagcccttcatgggcggaagtcagctgtttaaaggggtctcactattcttaatacgcattgggcaagggcaaggtcaatgttcaggtggagttttgagggggatattccaacccaaggcacaagggtgtgcactcctaccgccaatctggctgtgggaagctgccccttgcttcacaagggtgatccttatttagaaaggaacgtgaatgtctgtgtcagccagtcaaaggtcggcggacaaggacccagaaggaagtagactgagctgggattgtcttactattccttttgttgttgttgagatggagtcttgctctgttgcccaggctggagtgcagtggcgcaatctcggctcactgcaagctccgcctcccgggttcacgccattctcctgcctcagcctcccgagtagctgggactacaggtgcctgccaccacgcccggctaattttgttttgtatttttagtagagacaggtttcaccatgttagccaggatggtctcgatctcctgacctcgtgatccgcccgtgtgggcctcccaaagtgctgggattacaggtgtgagccaccgcacccagcctcttactatttcagtgtgggatcagaggccacaccagattccatgctcaggagtgggcactctgattatcatcacaatccagccaaatactgttttgtagttacttcgtgcttagcattctccatgcatcatctcatttaatcctcacgatcttctaagttaggtatattgttattgataaatgagaaaatggagagagagagaggacacatgtgtaagtttcctctggacgctgttataaagtgccacaggttgggtggtttaaacaaaagaaatttcatctcttaaaagttctggggccgggcgcggtggctcacgcctgtaatcccagcactttgggaggccgaggcgggcggatcacgaggtcaggagatcgagaccatcccggctaaaacggtgaaaccctgtctctactaaaaatacaaaaaattagccgggcgtagtggcgggcgcctgtagtcccagctactcgggaggctgaggcaggagaatggcgtgaacccgggaggcggagcttgcggtgagccgagatcccaccactgcactccagcctgggcgacagagcgagactccgtctcaaaaaaaaaaaaaaaaaaaaaaaaagttctggaaggtagaagttgaaaccaaggtgttggccaggccatgctctctctgaaggctctgggggcagaccccttccaggccactcttctagcgtctgacgtccccagcagtacttgcttccatggcgggtaaggcatcccttacatcatctgcctctgtcattgcgtggccctctctgctgtgtcttctccttttatggatgccagtcattggattttgcgcctaccacaccccaatgtgacctcatcttacctaattatacctgcaaaatctctgtttccaaataaggtcacattctgaggtaatgggggttaggatttcaacacgtcttttttgggagcacgattcaacccataacaatatgtaatatacccaaggttacccatctgggaggtaactgtcttcagggtaaacttggggaagcatcccctctctgtgtgaggcaagatttgaattcttttcatagcagcaagaggacagttgaggattccgtgaggtggtttgaccaaaggattttgtctgtttcattttctctgtccaaagcaatgccatccacataattgcaattttttcagaacatggattgagaaatgcttagaggttcgttttgtttttatatgttttaaaaaaatgttacttttaacaatgaaaagagatcattccttatatattgaccagtgattagattttaaatctacttttctayaaaacacaacttttattctttcctatctttgtggaaarcattcacatcaaagtgccacatcatgggtatgcatacatgtttgtatatcatagactatctggatgtttttaagtttcttatcgagatataattcatataccataagtgttgccattttgaagtgtacaattcagtggcttttagtatattgagaaggttgtacaatcataattccagaatgttttcatcacctccagaaaagaaaccctgtacccatgaacaatcagtccctctctctcwcccccattccctagcaaccactaatctgctttctgtttctatggatttgcctattctggacatttcatataaatggaatcatccaatatgtggccttttatgtctggcttctacttagcatcatatttttgaggatcatccgtgctatatcatggatgggtaccatgttcctttgatggctgaataatacccccttgtagggatggaccacgtttagtttatgcacacatgagcttgastggctgctctttaaagggtataaaagaaaccagtyctccctggaggggaccagggaaatggggctcatggatggcaagaggttttttcatcatggtgttttgtgttgtttaaatttttacattgtttgtatgttacctttaagaaatgaaggaattgatgtttacaattcagtgttcttgtgaaatgcagggtgtggcatttgtgatatgaccagggcctcctcacacctctgcagcttgagattctcaccaaagcacagcacgttcctcacccaggagtagggacagcagcccaggtccccaagggctggccagtttcagctgggagatgggtgactggttccttgcaccgcccctccgcattcacaatccatgtgtccctcggcacagttatgaatcactccatagtggagccactttagggtgagggagaattaggttagcaaatgctaacactggaaacgcactgtctgcctgggtcctgcgaggctggcacagtgtcaacagctgtgtgtaggagacgtgattgcctggaacccccaagaatgcacctaaaaatcatcaaacaccatcagattacaaaccaatataaagaattgatagtttttctatggaagaatcaaaaatcactttggaaaatagaatggaaatcaaaatcctgtaatagcaataaaaactaaagacttggcctggcgtggtggttcatgcctgtaaacccagcactttgggaggctcaggtagggggacttgaggctaggagtttgaaaccaaactgggtgacatagtgagaccctgcctctacaaaaaaataaaaaaattaactaggcatggtggtgcatgcctgtagtcctagctacttgagaggctgaggcaggaggattgcttgagcccaggacttggaggctatagtgagccatgatcgtgccactgcactgcagactgagaccctgtctcaaaacaaccaaacaaacaaacaaaaataaaaaactaaagacttacataaattcagggacttttacactgagaagatccaatatagtgaacatatcaattctttctaatctaatctataaacttgatgtgatcccatcagaaaatttaattgtttagctaggaaagcagagttcccagatgagaaatgtgagagtagctgaaatagttctgaaaaaagggaagactgggcccgggggtatcagtcatcccagttattaaaacgtgtcataaagctgcaataaaccaaacagtttggcaggggtacaagaaaagagagccaaggaatagactgactgcatatgagaatttggtttacaataaaggagacaattagaattaggaaacgatagttactcatccaattgtgttagaacacctggcccaagaggcttaacctctgccctactatttactatcaaacaaatcaaaccatggttcaaagattaagataaaataaagctatgaaaggaytagaatacaacacacattttttgaaagaatgataattttgaaggggaaaggatcttgctaagcaagacacaaaacttagaaatggtaaagaatggtctgtttgaccactgactacacaaaaattatacaaaataatctgtgtggcaaaaacaattacttcatttgagttccagagacagaggaccagggagggaggacatatttgcaacacacataacaaaggataaattctttaacattgagtgtgtacttttagaaatcagtaagaagaatgccaagaccctgagaaatagaataatgtgcaaaacacagtgacaccgtaagaaatwaatatagaaatggcatgtgttgatttaaaaagagacccagtctcagtcacagatgcaaataaccacctagagatagtatttttcacctgtgccagcaactgagatcaggagtttaatatacatagatactgtttaccaaaggctgtcaggtaagctcacggagttttgttgggaatggaaactagtgttgtcttttttggagggcaaatctgtcaaagatgaaaatccatttactctttggcccccaactccacatctagaaacatgttcacgtgtgcagactgtggatgcaaagtctgtttcagcagtttttagcaaaggcatggtaatgacccaactgtttattcttgggaactgggcatataaatggtagtacatcctcctgatgaaatgtagcagtgtaaaagtattttgtatgtgtgctgatatggaacaattgctgaggtaaagaaaaattaagctgagaaatgtctgtgtagagatgtgtatatgtcagacagttattcatgcctcggacatacttagagatacagaagaaactcttcagggcatatgtctcagactcaagtagaacacagacttacctttctatccaatatcttttttaccagttgattgttttcaaccatgtatgtgacctacttttaaaataataaaaagcagttggctggtgacagttgacacacaactgtcaagtattcacttgaagaataatggaaagaaggtgagttttttgttttgtttttttctggagacagagtctcgctctgtcccccaggctggagtgcagtggcacgatctcggctcactgcaacctccacctcccagattcaagcagttctcatacctcagcctcccgagtagttgggggtacaggcatgagccaccgtgcccggccgaatgtgtgttttaaaggaaatgttattttgtctttcaaattagcagagaaagaaaaaaatggcattacccaatgctggagggggtaagtgccgatatcgtgtcaattgatctgaacccttgggaaaataatttggccatatggcacacgtgctttaaaacagctctattctttcacccagtaatttgattttagaaacctagagaaaaaaattttatttaaagacacattttaagtaaaatgaagaacattttacttatttttatgtccagtacagtcaaagcagccacattgcataaccccrggggacccccttcctctttgtgatgccccagaacaatattgatttgattatagaaagccaccggcagcctacatgcgcaacggtgagttgttggttatatacactgtggaccatacagtggaatattacagtcaataaaaggtatttttagagagaaaaaaaaacattggaacacgcttatgatataatgttaggcaaaatcgctgttatgaacagctcgtttggggcagagcaaatcctgggaagtaacrctgaggctgttggtgcaggcrgtggagtacaacatcttcgagggtatggagtgccacggctccccactagtggtcatcagccagggcaagatcgtctttgaagacggaaacatcaacrtcaacaagggcatgggccgcttcattccgcggaaggcgttcccggagcacctgtaccagcgcgtcaaaatcaggaataaggtgagtgtgtctgcaggggagcgggcccacccgtgggaccagagccgacagcgtctcttggggaatcgagatctgacgtgtgcagagttaataatgtcatcgccctgggaacctccrtttccttatctgttaaatgggttgagacgctggcctgggctcctgtctgaggacaggagtgagcatcaaatgargacatgcaagttccagggckttgcaaactgtagaggggtgtgcacccgtgagggtgggtggatcatgggagggacgcttaccaagctgctctgggcgctgtcctgcgtcatcttaagtaatcctgcccacccacgggaggtgctgtgatcctccttttgcagcccagagcagtgaagggcttarccagagtcacggctcagaaaccctcgggtctggccctgtggagmaaggtgttacccctggcatcttgcaggcagggcttccttcagatccgccctttcttcctttccttcctcccttgacgtttctgccctgtcgttccttattttccttgaacaaccttagcactgacctcaggacatctgtcaaagggaaggagcaggctctattcctaactttagagcaactcagaggagggaactttctcacagctgagagagactcccgcccgtggccaacatcttccccagccaggccctcccatccccatggcagctgctttccccatgagacagctgatgtttgccagaaaggccagcttcgtgtgtgtgtgtgtgtgtgtgcacgcgcacatgtgtgtatgtctatgcgtgtcatgtgtgcatgtgtacatgcatgcacgtgtgtatgtgtgcatatggggatgtgtgtgcgtgtgttggagtgtgtgtgtgtgcgcgtgtgtgtatgcgagcatgtggtgagctctgtgtgtgtggccatgtgtgtacctgtgtggtcctgttctttgtatgcttcctaagtgrccaattgagatggagaagtccagagaccttcctgcattcccaggctccagcccggactgggaggctctgcatctggttttggtctctccccagcttccataaggtgtagcaccaggtcaaagacaccaagtcgcacagatgctttgcactggatggggaaacaagggatggggtggaaacaagtcagatccgagacaaggccaggcacaggcagcaggccatatgaggacaaggggactcatggaaatccctggctgggacacccactgaagaggcagacacaccccttggctggcttcatttccttcttggtctgaagctgaggcctgcggttaacagtcagcttccgtgagggcagatatctgaccccaaatgccaagacagcaatttgcaggagcaataggatcggggggtcccattgcacagggattccttcatgcctgcaggagctagaccaggtgaaggagagacctgcatcagagcctgcctctggccacctgagcttcagggagtgatgaacggcctcacccaggaagcaatgccacagccacagagaatgcacaggatacagtgaggcccagggagtcggggagcagggctccagggacagaggggagggccgttgacatgatgtgcaggtgctgggtctttaaacttggtgctaaaattaaggcttcctcctatggagagacaggagcccagagctgggggtcagggtgctatcacctgcagagaaggagggagccaggcctggggtcagggcactgtcacctgatatggaggatgaagccccgtgttgggttagggcactgccactgactcatgctgggaccctgtacaggtccctgaacacatgctgttctccagtgcctggagcaggtgccctcccaaccttggccatccctgaggtcacctgggctgctgtcagcagttcccagcaggctgacagcctcctgcctggaagccctgctgctttcagggtctctgcccccacaaccctttcccagtggggctagggctgtggctccattgccctccttccycgtcctcctgcaggctggtgtggaggtgtcctccccacagcatccccagccctgccccccatagacctggcccactccttgtccctctgtactgagttttctccctccctgtctcagctccccactccttccccctttctggaaccatctcccaacaaactatctgccccccgaatctttgcctcgctgttgacttctacaagaacatacatgaagatgggcccgttgctgctgccttgtctgggactcaggggtcctttccgggggtgggtaggtggtagtgtcaggcaaagtgacttctctttggaagggatttggggtcctcctgcatgaagctttgtgtgtatgagtatgcgtgtgtgtaagtgtatatatgggtgtgtatacctgtatgagtgtgtgtgtgggcatgtatgcatgtgtatacatatgtgagtatgcctttgtgaagatctgtatgtgatttaagtgtgtgtgcgtgttcacgcgtgtatgctactgtgtaggcctgttttgttactgcatgtgcatgcatatatgtgtgcatgactgcatgtatgtgagtgcgtgtgcgtggtgtgtgcgtctgtatgtgtatgcatgtgggtatgtagatgtgtgtgtatgcatgcttgtgtgtatgaatgcctgtgtgcggctgcatgtgtgtgaagtgcacctgtcgtgtgtgcgtgttgtgtgtgtgtgtgcatgcacatttgaagtgacctcaggtttctctctcgcccgcagggctctgctttatctgcccagaagggcacacatgcacagtgtygatcaatcacactctcccttcctctgtttaggtttttggattgcaaggggtttccaggggcatgtatgacggtcctgtgtacgaggtaccagctacacccaaatatgcaactcccgctccttcagccaaatcttcgccttctaaacaccagcccccacccatcagaaacctccaccagtccaacttcagcttatcaggtaggaaagagtggtggcccaggctccccacaattgcagcagttcaggccgagtccttsctgctgcttctgaggaaatggacaygtggccttggacactagatgaagawgcagggaagggagtgtgccccacccgagcctgntctcactggtggggcagagtgggctggcatggtcaccaagcagaggggggtccatgttaggggggcaacatggtggtacctgatgtgggtttacaaagagaggtaccaaaattgtcccagtgctcatccttacacacatttggggacactttcacactcttcctcatgaaagtaaacatggagtggtggggatgaacaagagatgggagtagctgccatttgcagggcatgtgctctgtgtaagtctttagcctgttcacccactgcagtgtactaagcactttcataacccatgattttattttatcctcactactccataaagtaacattataccctatttatttaaagaggaaacggaagccccaagaaatccagtgtcaaaataccaggacttggtgctcaacaaatgtgtgggaacaaaattagatgttgacctgatccctcctgactttcttaaggtctcagggcagtgtatctgygatttggtgagatggccacatgagggcaggcacgcacacgttgagaaagttgaactggaattttgtcctgcaaactctttgaggcgttgcatgggttgcacaccgtgctgggtactaagagtatggtgattttttttcttagaaggccggatagtaaatactttaggctttgtaagctaagaggcaacatctaggatgtcaacatctaggatgttatattcaatagccatttgaaaatgtacaaactattctcaggtcatggatcgtacagaaacaggcggtgggccggatttggtcaatggacccgtttgctaattcctggtcaggaaaggcgatatgcttagcaaaagagagagtggaaggggcaaagagagagagagagagaggatgacgtgtgaattcagattgtgtggtggcagaacctcttatccattcaggaagtgtctgattcagtgattatgccgaggaggcatgaatcaaggaggcctccccattcatctcactctccataagactttgatggaagagcttccagtgtttcatatttttgcacaaaatggaccctaaatagaatgctaaaagtcatgtgatgctcaatcagcaaaccagggattggcttcatcctgggaaaaagctatctgggtgcaacaagacacaagctctcaaggagtttgcaaactggaccactgttctggagttatgcaattaaacactgcacaattgcaattaaacatggacagaaaatcctcctccccgttgttcttagaacaagaataacaatgaagttaaaagccacctggaagggcccctcctcacccttgttctctcagtttcactcttagtcctcctgaggcccacagcaccactgctgtcagccagcctcttggcaggttgataggtgacttcatttggtaccaacaacacagatgctttccaacatcataacaacctcacagatgccctttttaatatctgcgtatgttacgttatagagctgtaccatgagttagtgtctgttttcgtccatttacattgctataaaggattacctgaggctgggtaattaaagaggtttacttggctcacggctctgcaggctgtacaagcagcacggtgccagcgtctgcttctggtgagggcctcaggctacttccagcatggcagaaggcgaaggagagctagcgtgtgcagagatcacatggcaacagaggaagaaggcagaggtgctctttaacaaccagttcttccgagagctaatagagcaagaatttactcattactgtaaggctgacaccaagccattcatgagtggtctgtccttcatgacccaaacccctcccattaggccccacctccaactttgggatcaaatttcaacacgaagttttgggggacaaaagtccaaaccatattagtgtccttttttccagcaggtattttcaaagtacagacatgcaaccagcaaggtacagatggttgtaaggaaaaagttactaagtgctaggcctgattccaggcctttaggggagacttgtattgcaagaagacatattgtctaccagtgaaacaatgggagaaaagaaaagtcactactgtgaaccaaattcttagtggcttacatagacaaatcatgtaatgttggagttggaaggggctcatctagtctactgttcttattgtgcagaaaaggaaatgaggccaagggagtggggtggtgtcttactccaaattgcccaaattcaaggcatgattagcactgaaacttgagtctccttcctgttgcaggtgacaactacctggggccagtgttctgcagctagtaaaaaaaattcaccaagacagttgtcggtaaagaaagtcagatgtattagaaaaagtatgaaagggtacagtgggtaggtcagcaagaaaggagccgactgcaaggaaacaaaggcttgctggagattttataggatggtgcttgtgctgtgtgccgaagagggctttgtgcagtactgataatgctgtggttgcagtgagctaacttacttacgtttttctgttagctgaggatctggtgataagttgagtacaggaaggctgtgttgtagaccatgaagaaaggcagacttacagcttatttgctttctctttttgattttcctcagttccgccggctcaacttcccctccctgataaggactctatccttcccacctttcagcattatccacccttcatgatttactcatttaataaatatttgttgagctccaggcactgggtttgctgctagaattttacatctttatgcaagagaataggtaaaagtagaatggatggttggttttgaaagattaaaattaagaacctctgcacaccacccccccccccttcagatccacctatcgccaatgagggaagtaaatccagcttgcggagttcacatgcacatgcacacacatatgcacatgcatatacaaatgtgtacacacacaatatgtaaaatacctttggagtgtgggacagtgtgcctaagatcatgggctttgaaaaccaaccagtttgggcttcaatcctggcttccccacccarcaccygtgtcccgcaagacacgtggcctgaacctcaaattgctcacccgtaagttgggagtacaaacacccccttcatagtatgattgtgtgccctaaatgcagtaacatgttaaagcaccaaatgtgcgcctgcacacagtaggcactcagtaagtgtttgatcacctgtctcaggaatgtcggattttactggggattttracaagaacaccacaaggtggtcagggctgaaggtkgggggagcccagggactgaggggcacagaagagggagcagtggactctgtggaggccagggaggcttcccatggctggtcctggactgagccctgaatgaaggtgggtccagtggagtgcatggcagagtacatggcctccaggagcagcgtggaactgatgytaacagatcccatccagcagcgattggcgctctctttcaggtgcccagatagatgacaacaatcccaggcgcaccggccaccgcatcgtggcgccccctggtggccgctccaacatcaccagcctcggttgaacgtggatgcgcggaggagctagcctgaaggattctgggaatcatgtccatcccttttcctgtcagtgtttttgaaacccacagttttagttggtgctgatggagggagggggaagtcgaaggatgctctttcccttttctgtttaggaagaagtggtactagtgtggtgtgtttgcttggaaattccttgccccacagttgtgttcatgctgaatccacctcggagcatggtgttttcattcccccttcctagtgaaccacaggttttagcattgtcttgttctgtcccttccacttctaactccactggctccatgattctctgagtggtggttcctttgcaccctgtagatgttctaggatagttgatgcatgttactaaattacgtatgcaagtctgtgagtgcgtctgaggggacatcgccaaggactgactgagacacgatgccgagacctcaagccctgaggggcagtcccaaaacccttacagtgaagatgtttactcattgcccccacctctggtccacactagaaagaagctcgccccacctccacctgtgagatccgtgaattctcggaatggcaggggaagccttgcactaggttgcagagaagcatcctccacatcctgtgtcagaaaccctggtctccgtggcacttgtaactcaccgtgctgtcttctggtctgtgtgtgttcttcaagccagctctaggcttcaggccgagccaggttcacactcagaaagakgtctccccatccccattcggggctgacgatggggggctgatggctgcccctgcgtggcctgagtcctggtccctctgaggcagttgacggggcagtcagatttttaaagttttgtacaaagttttcctttgtaatcactcccatttttacttaacaaccaacttgttgtggctcttatttctgaattcaaagcttgtgaaaaaataaagaaaatgaactgcccactgacctgactagggcactttcatttcagtggtggtgtctggattgggtacgaatgcttggcagtccccccgcgtgataacgaatggtggtggctgcttcctgaggactcactcttggtagagactggtggatgtgggggtgggaggagagattcagttcatgacttctgaaggctgagttcctgagacccaaggaggcgaagagagggaagacggctgatgggcgggcttccacaaaataggctcaaatcttgcattgattccctcctgttgggcctttcctggctctctttcttcttgtattgtatggatcagcctcagactggaagctccaatctcctaaacttcacatttcttccttccatttccatgagctagagatacactaaaggacggataaaaacagcaggcaaagttgcttgcttccattagctgttgttagtaatagtgatgacaatgatggtggtgacagtaatgatggtggtgatggtgatgatggtgacgatagtggtgatgatgatggtggtgttggtgatagtgatgaagttgctggtaatgacaacaaatacatgggctgatagctgtatagcagttgctatatgccaggtgctctatgaggtagggattattatccccattgtacagatgaggaaactgactcagagtgagatcaataacttgtttaggatcacacacttaggaagtgatggaaccaggatttgaatccaggacccaggcactttgggccctagtccaaagctccttgctcctaattactgagctccaagggcatttgaggcagatggctttggatgctctggtcccacatcaacgcagggcttttcatgtacccttctcctcccccgctcctcggcttcgtgtggatacctttgtcaaggttgaaagaagtgttggctcagggtcagttatagacttccttgaaacaaggttaactaactactgagaaagaccaagaatggatggtaaggatttttggatggaaagaccaagaacggatggtaaggatttttgatgttcggctttggcccatttggactattaaagggaaacttccagaaaagtaaagttggcaggatgaagttatccagcctgttctctgggcctggcctcctcagtcctgtcagggtggaagtggaagcagaagcagccctagcaccttctctaagacagactctgacggggtgcttgcctgactcccaggtcatgggagccactgtccaaccagcataatctagagcccatgtcgaactttgggttccccagcgcctccaagaggcacagttacaggggacaggagacctggtagctcagataatccttagttcttggagactgagctgcaacactccttttaaggcatgtgacttccttttacctcttgagattttgggaggagggagagagagtttctcagaaagttttaggggaaggctattctcattcattcatctgcaacccaattctcccagccatgtgacataacatactcacaggcccagggattaggatgtggtcatcttgttggcagggacggggagcgttattctgcctaccacagtagtcttctgggttttttctagaagttttatctttcacatttaggtctctgagccatctctcaataatctttatgtacaatataaggtaggactgaaggttctccatttcccatatgatctcccattgacccaacaccatttattgcaaagactattctttcccccattaagaggcagtggggcctttgttgtaagtcaggtgattgacccttctgattcagtggtccagaagtgtgctgccaaatcaatgttgaacaatgggtgaaggtgggtggggtagaaagcccttgtttgtagtgtttgctagttctgtggaccccacttctgttaccgattttctgtcttagtccatttggcatcactgtaactgaatacctgagatggggtaatttataaagaaaaggaattcatttcttacagactttgagactgagaagtccaaggttggggtggtgctggtgcatttggtgagagccttcttgctggtggggactctgcagagtcctaaggcagtgcagggcatcacatggtgagggggctgagtgtattggctcaggtctcgcttcctctgcttataaagctgctggtcccgctcccatgataacccattaatccactgactcactgatacattaatctatgaatgaattaatccattcatgaagggagagccctcatgacccaatcacctctaacaggccccacctttcagtactgccacattgggtattaagtttcaacataagtctcttgccatggccaatttcaacctatcgacattaagtaaatgagtttggaatccagaccacttaactgttggctctgatgtcccaggaaggggtggttctggcccctctgcatttgttggtgtattagtctgttctcactctgctgataaagacatacccaagactgggtaatttataaagaaaaagaggtttaatggactcacagttccacgtggctggaacttcacaatcatggcagaaggcacgtcttcatgatggcaggcaagagagagaatgagaaccaagtgaaaatggtttccccttctaaaccatcagacctcttgagacttattcactaccacaagaacagtatggggggaaactgcccccatgattcaattatctcccaccaggtccctcccacatcacggaattatgggagctacaattcaagatgagatttgggtggggacacagccaaaccacatcagttggtttgtctatctttgcctccagattgcatattgactcttaaaaagtgagacagaatgggcaaggtctttgcacatacttttccttcatctacgtaaagccaaaccattttcagatgtcaccagtagggtctaccatgttctagcccccagggttggtctggccaccttgatcatagacagtggacaagagaaggtgctacccttatcctggggccaaatctctatagactcaacagagctactcttctgacgtaagtgcgtaaccctcctctgtgttactctttccaaggcagagtgtggccgtgatgcccattgacagtgtcatttgcctaaaggttcattccaatcaagtccatttatgaagtgaaaaaccatgaaaagaagtttcctaagcaaaaggggctcttagcaagttgaactttctatttttctcttagtgcagacctgcagagattttagaggaaaagacacaggggccctggtgcacctggcttcagagtaaagcctctcactggtagtctgttcccaagaggaggaaagctgtggcatggctgtgcgtccagagtccatctgggaattttctgggagatctatcaaaccacttaggcagcctggctatccattatgcctggatgtggacttcaaagtctttccctatcagacgggagccaaacaccacgtgggtagcttggggtcccagcttgcaatggacaagagccccgacacggtgcaggaagcctctatagccactgccctcccccatccaggccactgtatttggaaggaagaatgtcgaccaggacctccatgactccagtttcatagcaaaaaagaacactccgtatcccaacgttcacttgtagccatgtgggcaaatgcctggtgcaggggatttctcctgggccaggcggccctgtgacctttaggctggggcctcagcctcactgattccttctcccaacctgccctgcctttgcccagagcatgacggaggcagctaagtggtttccagagaaaggagaacatggacaggagtcagttctctagggttgcctgggcccagagttctcaggaggttgaagggtcaactaagcctgagacggcaagtgccttggtccacgtcctctgagacgcagacactgagccaggattagatgtgggcaagatgtgtactgggggacatatctgtgaggcaaaatgaggagagagccagaggaggcagagcccacagatttgcgatgcagctgacagccccatgatggagggagagagggaggggagagaggggagaagggaagggagggagggaagggagagaggggaaggagggagggaagggagagaggggaaggagggagggagaaaagaaggacagagggggtaaggaaagaagggagggaggggaggaagggagtgaagagagggtagaaaggagggagggaggcaagactctggtgctgcacagttctacatctcagcaggtagagcaagaagtcctggggcccaggctgtcctctggaggagccctgtcatgtgggctaaggaggcctccacatccctgcctcttgcaggcactgggagcaccctgcaggaagtgtggcctccatgctcacgcagggaaggatttctgagcacggcaggaaatcccaaggatgttggtcgtttttgctccttgccgttggggacccaagaggtacatgttcatggccaccacagccagaacaaggcggatgaagagctcacctcagactaagtccagcggctggactgcaggctatgtcggtgggcaggaggtgcatcaggaagtggaccaagtccatcagcgggagcccagtggggaaaaaacagatccccaggcctcctgtccaatctgctgactcagaatctctgggatggggctaagaatgttgtttttaatgagcccctgggtaatgctgacacacagccaaatctataagccatggggggaaaatagtattcctggcctccctccctccctccttcctttccaatccatacaccacaggaggaaagtatatactcagcgttcctccctcccttccttccaaaccagttgccacaggaggaaaggaatattcccaggcctccctcccttccttccaccaggtgaccatgaatgcctgttatatgccaggtggcatgtggccggtcaatggtgtacattccaggggggacgtcaggtgcgaatcaaatgattactcaaagcaccgaactgcacactctgttaagggctatagaggaaacatttaggggagaataatcccatctcccactcctctggtttccatagagggaggggcttccactctctgggggacagcacaagggacttccctggcccctctccctctctcttttattcttctctggggaggaggagaaatacctgattggccagtctgggaaggatcactcccaagacagtgcctgcctctggatcgattcgttccccctataaatcacgctttaccctctaaacggccacatttcccccatttcccgtctccctatgagggtgtggaagcacctggacctcactggtttgtggggtcatcactctcctgcaattccccatgccatgcacgttacgttggaatgcttttctttttcctattggtctgcctttggtcaattgtttctcaaggagccttcgtagggtggaggaaaagcttgccctctgtgccccacagctgattcactgtaaagctcatggagctcacacttctgccacctgtgcacagaccccaccgaggcccgggagtgggcttagccacgggttcactgacacattccttacagtttacaatgccacagtcagatcttttagctgcaatccttaagaccactgttccctttcctgctgatgccactgcatatcaggtgacactagggaggcctgggacatttggaggatctgggtaagggccagttgagttgggtttagtgggattgtttatgtgggtctcactgtacacctctgtgtatagtgatgaacttggacaagaaataaaggaaggttatttatatgctcccccaccgacctcaccccagtcccagcagcaaagaacacaggacctagaatctaaggggggccctgatgttgttcagggttgggggcagagggggatctctggagatgtgagtcctgactccatgtgaggagtggctaggagccactgggcagagggctggggaggggggcaggg
